(19) United States
(12) Patent Application Publication
(10) Pub. No.: US 2016/0177328 A1
(43) Pub. Date: Jun. 23, 2016

(54) PLANTS HAVING ONE OR MORE ENHANCED YIELD-RELATED TRAITS AND A METHOD FOR MAKING THE SAME

(71) Applicant: BASE PLANT SCIENCE COMPANY GMBH, Ludwigshafen (DE)

(72) Inventors: Yves Hatzfeld, Lille (FR); Jonathan R. HOWARTH, Manchester (GB); Malcolm J. HAWKESFORD, Harpenden (GB)

(21) Appl. No.: 14/785,665

(22) PCT Filed: Apr. 17, 2014
(86) PCT No.: PCT/IB2014/060790

§ 371 Date: Oct. 20, 2015

(30) Foreign Application Priority Data
Apr. 30, 2013 (EP) 13166052.4

(51) Int. Cl. C12N 15/82; C12N 9/90; C12N 9/02

(52) U.S. Cl. CPC C12N 15/8261; C12N 15/8271; C12N 15/8273; C12N 9/0036; C12N 9/90; C12Y 106/05005; C12Y 502/01008; C12Y 106/99

(57) ABSTRACT

A method for enhancing various economically important yield-related traits in plants. A method for enhancing one or more yield-related traits in plants by modulating expression in plants of a nucleic acid encoding a FKBP 16-3 (FK506-binding protein) or a quinone reductase-related (QRR) polypeptide. Plants having modulated expression of a nucleic acid encoding a FKBP 16-3 or a QRR polypeptide, which plants have one or more enhanced yield-related traits compared to control plants. FKBP 16-3 encoding and QRR nucleic acids, and constructs comprising the same, useful in performing the methods.

### BACKGROUND

[0001] The present invention relates generally to the field of molecular biology and concerns a method for enhancing one or more yield-related traits in plants by modulating expression in a plant of a nucleic acid encoding a yield increasing polypeptide selected from (a) a FKBP16-3 (FK506-binding protein) polypeptide or (b) a quinone reductase-related (QRR) polypeptide. The present invention also concerns plants having modulated expression of a nucleic acid encoding a FKBP16-3 polypeptide or a quinone reductase-related (QRR) polypeptide, which plants have one or more enhanced yield-related traits relative to corresponding wild type plants or other control plants. The invention also provides constructs useful in the methods of the invention.

[0002] The ever-increasing world population and the dwindling supply of arable land available for agriculture fuels research towards increasing the efficiency of agriculture. Conventional means for crop and horticultural improvements utilise selective breeding techniques to identify plants having desirable characteristics. However, such selective breeding techniques have several drawbacks, namely that these techniques are typically labour intensive and result in plants that often contain heterogeneous genetic components that may not always result in the desirable trait being passed on from parent plants. Advances in molecular biology have allowed mankind to modify the germplasm of animals and plants. Genetic engineering of plants entails the isolation and manipulation of genetic material (typically in the form of DNA or RNA) and the subsequent introduction of that genetic material into a plant. Such technology has the capacity to deliver crops or plants having various improved economic, agronomic or horticultural traits.

[0003] A trait of particular economic interest is increased yield. Yield is normally defined as the measurable produce of economic value from a crop. This may be defined in terms of quantity and/or quality. Yield is directly dependent on several factors, for example, the number and size of the organs, plant architecture (for example, the number of branches), seed production, leaf senescence and more. Root development, nutrient uptake, stress tolerance and early vigour may also be important factors in determining yield. Optimizing the abovementioned factors may therefore contribute to increasing crop yield.

[0004] Seed yield is a particularly important trait, since the seeds of many plants are important for human and animal nutrition. Crops such as corn, rice, wheat, canola and soybean account for over half the total human caloric intake, whether through direct consumption of the seeds themselves or through consumption of meat products raised on processed seeds. They are also a source of sugars, oils and many kinds of metabolites used in industrial processes. Seeds contain an embryo (the source of new shoots and roots) and an endosperm (the source of nutrients for embryo growth during germination and during early growth of seedlings). The development of a seed involves many genes, and requires the transfer of metabolites from the roots, leaves and stems into the growing seed. The endosperm, in particular, assimilates the metabolic precursors of carbohydrates, oils and proteins and synthesizes them into storage macromolecules to fill the grain.

[0005] Another important trait for many crops is early vigour. Improving early vigour is an important objective of modern rice breeding programs in both temperate and tropical rice cultivars. Long roots are important for proper soil anchorage in water-seeded rice. Where rice is sown directly into flooded fields, and where plants must emerge rapidly through water, longer shoots are associated with vigour. Where drill-seeding is practiced, longer mesocotyls and coleoptiles are important for good seedling emergence. The ability to engineer early vigour into plants would be of great importance in agriculture. For example, poor early vigour has been a limitation to the introduction of maize (Zea mays L.) hybrids based on Corn Belt germplasm in the European Atlantic.

[0006] A further important trait is that of improved abiotic stress tolerance. Abiotic stress is a primary cause of crop loss worldwide, reducing average yields for most major crop plants by more than 50% (Wang et al., Planta 218, 1-14, 2003). Abiotic stresses may be caused by drought, salinity, lack of nutrients, extremes of temperature, chemical toxicity and oxidative stress. The ability to improve plant tolerance to abiotic stress would be of great economic advantage to farmers worldwide and would allow for the cultivation of crops during adverse conditions and in territories where cultivation of crops may not otherwise be possible.

[0007] Crop yield may therefore be increased by optimising one of the above-mentioned factors.

[0008] FKBP proteins, present in both eukaryotes and bacteria, are receptors for the immunosuppression drugs FK506 and rapamycin. Binding of FK506 results in T-cell suppression while rapamycin blocks the T-cell cycle. Many FKBPs are peptidyl-prolyl cis/trans isomerases catalysing the rotation of the peptide bond preceding proline residues between cis and trans configurations. They are involved in diverse cellular processes, such as regulation of hormone signaling, stress responses, or protein folding. FKBP proteins can have, besides the FKPB domain, other domains as well, such as membrane anchor sequences, lysine/arginine-rich regions, regions of high concentrations of charged residues, TPR domains, calmodulin-binding domains, trigger factor domains, lysine motifs, or Gly-rich repeats (Gollan & Bhave, Plant Mol Biol. 72(1-2):1-16, 2010). The cellular localisation can be various, some are cytosolic, others are located in the nucleus or are secreted (Gollan & Bhave, 2010; Wang et al., Plant Molecular Biology Reporter, 30(4): 915-928, 2012; He et al., Plant Physiol. 134(4): 1248-1267, 2004). Many of the plant FKBPs are located in the chloroplast (He et al., 2004. Gollan & Bhave, 2010). A particular group of FKBPs are the FKBP16-3 polypeptides (nomenclature used by Gollan & Bhave, 2010) and their homologues (e.g. PtFKBP26-1 and PtFKBP26-2, Wang et al. 2012; ZmFKBP8, Wang et al., Genet Mol Res. 11(2):1690-700 2012(b); AtFKBP16-3, Gollan & Bhave, 2010, TaFKBP16-3, Gollan et al., Physiol Plant. 143(4):385-95, 2011). FKBP16-3 polypeptides have a single FKBP domain and a chloroplastic/thylakoid targeting signal (Gollan & Bhave, 2010). The wheat FKBP16-3 was functionally characterised (Gollan et al., 2011): the protein overexpressed in, and purified from E. coli, lacked detectable isomerase activity. A yeast two hybrid screen revealed interaction between TaFKBP16-3 and APO2 and between TaFKBP16-3 and TaThf1. These data indicate a chaperone role for TaFKBP16-3 in the assembly of thylakoid membrane complexes. Still, the function of FKBPs in the chloroplast thylakoid remains unclear (Gollan et al., 2011).

[0009] With respect to quinone reductases, Greenshields et al., 2005 reports on differential regulation of wheat quinone reductases in response to powdery mildew infection. At least two types of quinone reductases are present in plants: (1) the zeta-crystallin-like quinone reductases (QR1, EC 1.6.5.5) that catalyze the univalent reduction of quinones to semiquinone radicals, and (2) the DT-diaphorase-like quinone re-ductases (QR2, EC 1.6.99.2) that catalyze the divalent reduction of quinones to hydroquinones. QR2s are involved in oxidative stress responses by making the quinones available for conjugation, thereby releasing them from the superoxide-generating one electron redox cycling, catalyzed by QR1s. Two genes, putatively encoding a QR1 and a QR2, respectively, were isolated from an expressed sequence tag collection derived from the epidermis of a diploid wheat Triticum monococcum L. 24 h after inoculation with the powdery mildew fungus Blumeria graminis (DC) EO Speer f. sp. tritici Em. Marchal. Northern analysis and tissue-specific RT-PCR showed that TmQR1 was repressed while TmQR2 was induced in the epidermis during powdery mildew infection. Heterologous expression of TmQR2 in Escherichia coli confirmed that the gene encoded a functional, dicumarol-inhibitable QR2 that could use either NADH or NADPH as an electron donor. The localization of dicumarol-inhibitable QR2 activity around powdery mildew infection sites was accomplished using a histochemical technique, based on tetrazolium dye reduction.

[0010] TmQR1 is expressed in epidermis and mesophylle of leaves. TmQR1 is downregulated in leaves during mildew infection.

[0011] However, nothing is reported on modification of certain yield-related traits in plants grown under abiotic stress condition, particularly under nitrogen deficiency, by using a quinone reductase-related polypeptide (QRR).

[0012] It has now been found that various yield-related traits may be improved in plants by modulating expression in a plant of a nucleic acid encoding a FKBP16-3 (FK506-binding protein) polypeptide in a plant. It has now also been found that various yield-related traits may be improved in plants by modulating expression in a plant of a nucleic acid encoding a quinone reductase-related polypeptide (QRR) in a plant grown under abiotic stress condition, particularly under nitrogen deficiency.

[0013] Depending on the end use, the modification of certain yield traits may be favoured over others. For example for applications such as forage or wood production, or bio-fuel resource, an increase in the vegetative parts of a plant may be desirable, and for applications such as flour, starch or oil production, an increase in seed parameters may be particularly desirable. Even amongst the seed parameters, some may be favoured over others, depending on the application. Various mechanisms may contribute to increasing seed yield, whether that is in the form of increased seed size or increased seed number.

### Definitions

[0014] The following definitions will be used throughout the present application. The section captions and headings in this application are for convenience and reference purpose only and should not affect in any way the meaning or interpretation of this application. The technical terms and expressions used within the scope of this application are generally to be given the meaning commonly applied to them in the pertinent art of plant biology, molecular biology, bioinformatics and plant breeding. All of the following term definitions apply to the complete content of this application. The term “essentially”, “about”, “approximately” and the like in connection with an attribute or a value, particularly also define exactly the attribute or exactly the value, respectively. The term “about” in the context of a given numeric value or range relates in particular to a value or range that is within 20%, within 10%, or within 5% of the value or range given. As used herein, the term “comprising” also encompasses the term “consisting of”.

[0015] Peptide(s)/Protein(s)

[0016] The terms “peptides”, “oligopeptides”, “polypeptide” and “protein” are used interchangeably herein and refer to amino acids in a polymeric form of any length, linked together by peptide bonds, unless mentioned herein otherwise.

[0017] Polynucleotide(s)/Nucleic acid(s)/Nucleic acid sequence(s)/nucleotide sequence(s)

[0018] The terms “polynucleotide(s)”, “nucleic acid sequence(s)”, “nucleotide sequence(s)”, “nucleic acid(s)”, “nucleic acid molecule” are used interchangeably herein and refer to nucleotides, either ribonucleotides or deoxyribonucleotides or a combination of both, in a polymeric unbranched form of any length.

[0019] Homologue(s)

[0020] “Homologues” of a protein encompass peptides, oligopeptides, polypeptides, proteins and enzymes having amino acid substitutions, deletions and/or insertions relative to the unmodified protein in question and having similar biological and functional activity as the unmodified protein from which they are derived.

[0021] “Homologues” of a gene encompass nucleic acid sequences with nucleotide substitutions, deletions and/or insertions relative to the unmodified gene in question and having similar biological and functional properties as the unmodified gene from which they are derived, or encoding polypeptides having substantially the same biological and functional activity as the polypeptide encoded by the unmodified nucleic acid sequence.

[0022] Orthologues and paralogues are two different forms of homologues and encompass evolutionary concepts used to describe the ancestral relationships of genes. Paralogues are genes within the same species that have originated through duplication of an ancestral gene; orthologues are genes from different organisms that have originated through speciation, and are also derived from a common ancestral gene.

[0023] A “deletion” refers to removal of one or more amino acids from a protein.

[0024] An “insertion” refers to one or more amino acid residues being introduced into a predetermined site in a protein. Insertions may comprise N-terminal and/or C-terminal fusions as well as intra-sequence insertions of single or multiple amino acids. Generally, insertions within the amino acid sequence will be smaller than N-or C-terminal fusions, of the order of about 1 to 10 residues. Examples of N-or C-terminal fusion proteins or peptides include the binding domain or activation domain of a transcriptional activator as used in the yeast two-hybrid system, phage coat proteins, (histidine)-6-tag, glutathione S-transferase-tag, protein A, maltose-binding protein, dihydrofolate reductase, Tag.100 epitope, c-myc epitope, FLAG®-epitope, lacZ, CMP (calmodulin-binding peptide), HA epitope, protein C epitope and VSV epitope.

[0025] A “substitution” refers to replacement of amino acids of the protein with other amino acids having similar properties (such as similar hydrophobicity, hydrophilicity, antigenicity, propensity to form or break a-helical structures or p-sheet structures). Amino acid substitutions are typically of single residues, but may be clustered depending upon functional constraints placed upon the polypeptide and may range from 1 to 10 amino acids. The amino acid substitutions are preferably conservative amino acid substitutions. Conservative substitution tables are well known in the art (see for example Creighton (1984) Proteins. W.H. Freeman and Company (Eds) and Table 1 below).

TABLE 1
Examples of conserved amino acid substitutions

| Residue | Conservative Substitutions |
|---|---|
| Ala | Ser |
| Arg | Lys |
| Asn | Gln; His |
| Asp | Glu |
| Gln | Asn |
| Cys | Ser |
| Glu | Asp |
| Gly | Pro |
| His | Asn; Gln |
| Ile | Leu, Val |
| Leu | Ile; Val |
| Lys | Arg; Gln |
| Met | Leu; Ile |
| Phe | Met; Leu; Tyr |
| Ser | Thr; Gly |
| Thr | Ser; Val |
| Trp | Tyr |
| Tyr | Trp; Phe |
| Val | Ile; Leu |

[0026] Amino acid substitutions, deletions and/or insertions may readily be made using peptide synthetic techniques known in the art, such as solid phase peptide synthesis and the like, or by recombinant DNA manipulation. Methods for the manipulation of DNA sequences to produce substitution, insertion or deletion variants of a protein are well known in the art. For example, techniques for making substitution mutations at predetermined sites in DNA are well known to those skilled in the art and include M13 mutagenesis, T7-Gen in vitro mutagenesis (USB, Cleveland, Ohio), QuickChange Site Directed mutagenesis (Stratagene, San Diego, Calif.), PCR-mediated site-directed mutagenesis or other site-directed mutagenesis protocols (see Current Protocols in Molecular Biology, John Wiley & Sons, N.Y. (1989 and yearly updates)).

[0027] Derivatives

[0028] “Derivatives” include peptides, oligopeptides, polypeptides which may, compared to the amino acid sequence of the naturally-occurring form of the protein, such as the protein of interest, comprise substitutions of amino acids with non-naturally occurring amino acid residues, or additions of non-naturally occurring amino acid residues. “Derivatives” of a protein also encompass peptides, oligopeptides, polypeptides which comprise naturally occurring altered (glycosylated, acylated, prenylated, phosphorylated, myristoylated, sulphated etc.) or non-naturally altered amino acid residues compared to the amino acid sequence of a naturally-occurring form of the polypeptide. A derivative may also comprise one or more non-amino acid substituents or additions compared to the amino acid sequence from which it is derived, for example a reporter molecule or other ligand, covalently or non-covalently bound to the amino acid sequence, such as a reporter molecule which is bound to facilitate its detection, and non-naturally occurring amino acid residues relative to the amino acid sequence of a naturally-occurring protein. Furthermore, “derivatives” also include fusions of the naturally-occurring form of the protein with tagging peptides such as FLAG, HIS6 or thioredoxin (for a review of tagging peptides, see Terpe, Appl. Microbiol. Biotechnol. 60, 523-533, 2003).

[0029] “Derivatives” of nucleic acids include nucleic acids which may, compared to the nucleotide sequence of the naturally-occurring form of the nucleic acid comprise deletions, alterations, or additions with non-naturally occurring nucleotides.

[0030] Functional Fragments

[0031] The term “functional fragment” refers to any nucleic acid or protein which represents merely a part of the full length nucleic acid or full length protein, respectively, but still provides substantially the same function when overexpressed or repressed in a plant respectively, or still has the same biological activity of the full length nucleic acid or full length protein.

[0032] Domain, Motif/Consensus Sequence/Signature

[0033] The term “domain” refers to a set of amino acids conserved at specific positions along an alignment of sequences of evolutionarily related proteins. While amino acids at other positions can vary between homologues, amino acids that are highly conserved at specific positions indicate amino acids that are likely essential in the structure, stability or function of a protein. Identified by their high degree of conservation in aligned sequences of a family of protein homologues, they can be used as identifiers to determine if any polypeptide in question belongs to a previously identified polypeptide family.

[0034] The term “motif” or “consensus sequence” or “signature” refers to a short conserved region in the sequence of evolutionarily related proteins. Motifs are frequently highly conserved parts of domains, but may also include only part of the domain, or be located outside of conserved domain (if all of the amino acids of the motif fall outside of a defined domain).

[0035] Specialist databases exist for the identification of domains, for example, SMART (Schultz et al. (1998) Proc. Natl. Acad. Sci. USA 95, 5857-5864; Letunic et al. (2002) Nucleic Acids Res 30, 242-244), InterPro (Mulder et al., (2003) Nucl. Acids. Res. 31, 315-318), Prosite (Bucher and Bairoch (1994), A generalized profile syntax for biomolecular sequences motifs and its function in automatic sequence interpretation. (In) ISMB-94; Proceedings 2nd International Conference on Intelligent Systems for Molecular Biology. Altman R., Brutlag D., Karp P., Lathrop R., Searls D., Eds., pp53-61, AAAI Press, Menlo Park; Hulo et al., Nucl. Acids. Res. 32:D134-D137, (2004)), or Pfam (Bateman et al., Nucleic Acids Research 30(1): 276-280 (2002)) & The Pfam protein families database: R. D. Finn, J. Mistry, J. Tate, P. Coggill, A. Heger, J. E. Pollington, O. L. Gavin, P. Gunesekaran, G. Ceric, K. Forslund, L. Holm, E. L. Sonnhammer, S. R. Eddy, A. Bateman Nucleic Acids Research (2010) Database Issue 38:211-222). A set of tools for in silico analysis of protein sequences is available on the ExPASy proteomics server (Swiss Institute of Bioinformatics (Gasteiger et al., ExPASy: the proteomics server for in-depth protein knowledge and analysis, Nucleic Acids Res. 31:3784-3788(2003)). Domains or motifs may also be identified using routine techniques, such as by sequence alignment.

[0036] Methods for the alignment of sequences for comparison are well known in the art, such methods include GAP, BESTFIT, BLAST, FASTA and TFASTA. GAP uses the algorithm of Needleman and Wunsch ((1970) J Mol Biol 48: 443-453) to find the global (i.e. spanning the complete sequences) alignment of two sequences that maximizes the number of matches and minimizes the number of gaps. The BLAST algorithm (Altschul et al. (1990) J Mol Biol 215: 403-10) calculates percent sequence identity and performs a statistical analysis of the similarity between the two sequences. The software for performing BLAST analysis is publicly available through the National Centre for Biotechnology Information (NCBI). Homologues may readily be identified using, for example, the ClustalW multiple sequence alignment algorithm (version 1.83), with the default pairwise alignment parameters, and a scoring method in percentage. Global percentages of similarity and identity may also be determined using one of the methods available in the MatGAT software package (Campanella et al., BMC Bioinformatics. 2003 Jul. 10; 4:29. MatGAT: an application that generates similarity/identity matrices using protein or DNA sequences.). Minor manual editing may be performed to optimise alignment between conserved motifs, as would be apparent to a person skilled in the art. Furthermore, instead of using full-length sequences for the identification of homologues, specific domains may also be used. The sequence identity values may be determined over the entire nucleic acid or amino acid sequence or over selected domains or conserved motif(s), using the programs mentioned above using the default parameters. For local alignments, the Smith-Waterman algorithm is particularly useful (Smith T F, Waterman M S (1981) J. Mol. Biol 147(1);195-7).

[0037] Reciprocal BLAST

[0038] Typically, this involves a first BLAST involving BLASTing a query sequence (for example using any of the sequences listed in Table A of the Examples section) against any sequence database, such as the publicly available NCBI database. BLASTN or TBLASTX (using standard default values) are generally used when starting from a nucleotide sequence, and BLASTP or TBLASTN (using standard default values) when starting from a protein sequence. The BLAST results may optionally be filtered. The full-length sequences of either the filtered results or non-filtered results are then BLASTed back (second BLAST) against sequences from the organism from which the query sequence is derived. The results of the first and second BLASTs are then compared. A paralogue is identified if a high-ranking hit from the first blast is from the same species as from which the query sequence is derived, a BLAST back then ideally results in the query sequence amongst the highest hits; an orthologue is identified if a high-ranking hit in the first BLAST is not from the same species as from which the query sequence is derived, and preferably results upon BLAST back in the query sequence being among the highest hits.

[0039] High-ranking hits are those having a low E-value. The lower the E-value, the more significant the score (or in other words the lower the chance that the hit was found by chance). Computation of the E-value is well known in the art. In addition to E-values, comparisons are also scored by percentage identity. Percentage identity refers to the number of identical nucleotides (or amino acids) between the two compared nucleic acid (or polypeptide) sequences over a particular length. In the case of large families, ClustalW may be used, followed by a neighbour joining tree, to help visualize clustering of related genes and to identify orthologues and paralogues.

[0040] Transit Peptide

[0041] A “transit peptide” (transit signal, signal peptide, signal sequence) is a short (3-60 amino acids long) sequence that directs the transport of a protein, preferably to organelles within the cell or to certain subcellular locations or for the secretion of a protein.

[0042] Hybridisation

[0043] The term “hybridisation” as defined herein is a process wherein substantially homologous complementary nucleotide sequences anneal to each other. The hybridisation process can occur entirely in solution, i.e. both complementary nucleic acids are in solution. The hybridisation process can also occur with one of the complementary nucleic acids immobilised to a matrix such as magnetic beads, Sepharose beads or any other resin. The hybridisation process can furthermore occur with one of the complementary nucleic acids immobilised to a solid support such as a nitro-cellulose or nylon membrane or immobilised by e.g. photolithography to, for example, a siliceous glass support (the latter known as nucleic acid arrays or microarrays or as nucleic acid chips). In order to allow hybridisation to occur, the nucleic acid molecules are generally thermally or chemically denatured to melt a double strand into two single strands and/or to remove hairpins or other secondary structures from single stranded nucleic acids.

[0044] The term “stringency” refers to the conditions under which a hybridisation takes place. The stringency of hybridisation is influenced by conditions such as temperature, salt concentration, ionic strength and hybridisation buffer composition. Generally, low stringency conditions are selected to be about 30° C. lower than the thermal melting point (Tₘ) for the specific sequence at a defined ionic strength and pH. Medium stringency conditions are when the temperature is 20° C. below Tₘ, and high stringency conditions are when the temperature is 10° C. below Tₘ. High stringency hybridisation conditions are typically used for isolating hybridising sequences that have high sequence similarity to the target nucleic acid sequence. However, nucleic acids may deviate in sequence and still encode a substantially identical polypeptide, due to the degeneracy of the genetic code. Therefore medium stringency hybridisation conditions may sometimes be needed to identify such nucleic acid molecules.

[0045] The Tₘ is the temperature under defined ionic strength and pH, at which 50% of the target sequence hybridises to a perfectly matched probe. The Tₘ is dependent upon the solution conditions and the base composition and length of the probe. For example, longer sequences hybridise specifically at higher temperatures. The maximum rate of hybridisation is obtained from about 16° C. up to 32° C. below Tₘ. The presence of monovalent cations in the hybridisation solution reduce the electrostatic repulsion between the two nucleic acid strands thereby promoting hybrid formation; this effect is visible for sodium concentrations of up to 0.4 M (for higher concentrations, this effect may be ignored). Formamide reduces the melting temperature of DNA-DNA and DNA-RNA duplexes with 0.6 to 0.7° C. for each percent formamide, and addition of 50% formamide allows hybridisation to be performed at 30 to 45° C., though the rate of hybridisation will be lowered. Base pair mismatches reduce the hybridisation rate and the thermal stability of the duplexes. On average and for large probes, the Tm decreases about 1° C. per % base mismatch. The Tₘ may be calculated using the following equations, depending on the types of hybrids:

[0046] 1) DNA-DNA hybrids (Meinkoth and Wahl, Anal. Biochem., 138: 267-284, 1984):

Tₘ=81.5° C.+16.6×log₁₀ [Na⁺]^{a}+0.41×%[G/C_{b}]−500×[L^{c}]⁻¹−0.61×% formamide

[0047] 2) DNA-RNA or RNA-RNA hybrids:

Tₘ=79.8° C.+18.5 (log₁₀[Na⁺]^{a})+0.58 (%G/C^{b})+11.8 (% G/C^{b})²−820/L^{c}

[0048] 3) oligo-DNA or oligo-RNAs hybrids:
[0049] For <20 nucleotides: Tₘ=2 (Iₙ)
[0050] For 20-35 nucleotides: Tₘ=22 +1.46 (Iₙ)
[0051] ^{a} or for other monovalent cation, but only accurate in the 0.01-0.4 M range.
[0052] ^{b} only accurate for % GC in the 30% to 75% range.
[0053] ^{c} L=length of duplex in base pairs.
[0054] ^{d} oligo, oligonucleotide; Iₙ, =effective length of primer=2×(no. of G/C)+(no. of A/T).

[0055] Non-specific binding may be controlled using any one of a number of known techniques such as, for example, blocking the membrane with protein containing solutions, additions of heterologous RNA, DNA, and SDS to the hybridisation buffer, and treatment with Rnase. For non-homologous probes, a series of hybridizations may be performed by varying one of (i) progressively lowering the annealing temperature (for example from 68° C. to 42° C.) or (ii) progressively lowering the formamide concentration (for example from 50% to 0%). The skilled artisan is aware of various parameters which may be altered during hybridisation and which will either maintain or change the stringency conditions.

[0056] Besides the hybridisation conditions, specificity of hybridisation typically also depends on the function of post-hybridisation washes. To remove background resulting from non-specific hybridisation, samples are washed with dilute salt solutions. Critical factors of such washes include the ionic strength and temperature of the final wash solution: the lower the salt concentration and the higher the wash temperature, the higher the stringency of the wash. Wash conditions are typically performed at or below hybridisation stringency. A positive hybridisation gives a signal that is at least twice of that of the background. Generally, suitable stringent conditions for nucleic acid hybridisation assays or gene amplification detection procedures are as set forth above. More or less stringent conditions may also be selected. The skilled artisan is aware of various parameters which may be altered during washing and which will either maintain or change the stringency conditions.

[0057] For example, typical high stringency hybridisation conditions for DNA hybrids longer than 50 nucleotides encompass hybridisation at 65° C. in 1×SSC or at 42° C. in 1×SSC and 50% formamide, followed by washing at 65° C. in 0.3×SSC. Examples of medium stringency hybridisation conditions for DNA hybrids longer than 50 nucleotides encompass hybridisation at 50° C. in 4×SSC or at 40° C. in 6×SSC and 50% formamide, followed by washing at 50° C. in 2×SSC. The length of the hybrid is the anticipated length for the hybridising nucleic acid. When nucleic acids of known sequence are hybridised, the hybrid length may be determined by aligning the sequences and identifying the conserved regions described herein. 1×SSC is 0.15 M NaCl and 15 mM sodium citrate; the hybridisation solution and wash solutions may additionally include 5×Denhardt's reagent, 0.5-1.0% SDS, 100 μg/ml denatured, fragmented salmon sperm DNA, 0.5% sodium pyrophosphate.

[0058] For the purposes of defining the level of stringency, reference can be made to Sambrook et al. (2001) Molecular Cloning: a laboratory manual, 3^{rd} Edition, Cold Spring Harbor Laboratory Press, CSH, N.Y. or to Current Protocols in Molecular Biology, John Wiley & Sons, N.Y. (1989 and yearly updates).

[0059] Splice Variant

[0060] The term “splice variant” as used herein encompasses variants of a nucleic acid sequence in which selected introns and/or exons have been excised, replaced, displaced or added, or in which introns have been shortened or lengthened. Such variants will be ones in which the biological activity of the protein is substantially retained; this may be achieved by selectively retaining functional segments of the protein. Such splice variants may be found in nature or may be manmade. Methods for predicting and isolating such splice variants are well known in the art (see for example Foissac and Schiex (2005) BMC Bioinformatics 6: 25).

[0061] Allelic Variant

[0062] “Alleles” or “allelic variants” are alternative forms of a given gene, located at the same chromosomal position. Allelic variants encompass Single Nucleotide Polymorphisms (SNPs), as well as Small Insertion/Deletion Polymorphisms (INDELs). The size of INDELs is usually less than 100 bp. SNPs and INDELs form the largest set of sequence variants in naturally occurring polymorphic strains of most organisms.

[0063] Endogenous

[0064] Reference herein to an “endogenous” nucleic acid and/or protein refers to the nucleic acid and/or protein in question as found in a plant in its natural form (i.e., without there being any human intervention like recombinant DNA engineering), but also refers to that same gene (or a substantially homologous nucleic acid/gene) in an isolated form subsequently (re)introduced into a plant (a transgene). For example, a transgenic plant containing such a transgene may encounter a substantial reduction of the transgene expression and/or substantial reduction of expression of the endogenous gene. The isolated gene may be isolated from an organism or may be manmade, for example by chemical synthesis.

[0065] Exogenous

[0066] The term “exogenous” (in contrast to “endogenous”) nucleic acid or gene refers to a nucleic acid that has been introduced in a plant by means of recombinant DNA technology. An “exogenous” nucleic acid can either not occur in the plant in its natural form, be different from the nucleic acid in question as found in the plant in its natural form, or can be identical to a nucleic acid found in the plant in its natural form, but not integrated within its natural genetic environment.

[0067] Gene Shuffling/Directed Evolution

[0068] “Gene shuffling” or “directed evolution” consists of iterations of DNA shuffling followed by appropriate screening and/or selection to generate variants of nucleic acids or portions thereof encoding proteins having a modified biological activity (Castle et al., (2004) Science 304(5674): 1151-4; U.S. Pat. No. 5,811,238 and U.S. Pat. No. 6,395,547).

[0069] Construct

[0070] Artificial DNA (such as but, not limited to plasmids or viral DNA) capable of replication in a host cell and used for introduction of a DNA sequence of interest into a host cell or host organism. Host cells of the invention may be any cell selected from bacterial cells, such as Escherichia coli or Agrobacterium species cells, yeast cells, fungal, algal or cyanobacterial cells or plant cells. The skilled artisan is well aware of the genetic elements that must be present on the genetic construct in order to successfully transform, select and propagate host cells containing the sequence of interest. The sequence(s) of interest is/are operably linked to one or more control sequences (at least to a promoter) as described herein. Additional regulatory elements may include transcriptional as well as translational enhancers. Those skilled in the art will be aware of terminator and enhancer sequences that may be suitable for use in performing the invention. An intron sequence may also be added to the 5′ untranslated region (UTR) or in the coding sequence to increase the amount of the mature message that accumulates in the cytosol, as described in the definitions section. Other control sequences (besides promoter, enhancer, silencer, intron sequences, 3′UTR and/or 5′UTR regions) may be protein and/or RNA stabilizing elements. Such sequences would be known or may readily be obtained by a person skilled in the art.

[0071] The genetic constructs of the invention may further include an origin of replication sequence that is required for maintenance and/or replication in a specific cell type. One example is when a genetic construct is required to be maintained in a bacterial cell as an episomal genetic element (e.g. plasmid or cosmid molecule). Preferred origins of replication include, but are not limited to, the f1-ori and colE1.

[0072] For the detection of the successful transfer of the nucleic acid sequences as used in the methods of the invention and/or selection of transgenic plants comprising these nucleic acids, it is advantageous to use marker genes (or reporter genes). Therefore, the genetic construct may optionally comprise a selectable marker gene. Selectable markers are described in more detail in the “definitions” section herein. The marker genes may be removed or excised from the transgenic cell once they are no longer needed. Techniques for marker removal are known in the art, useful techniques are described above in the definitions section.

[0073] Regulatory Element/Control Sequence/Promoter

[0074] The terms “regulatory element”, “control sequence” and “promoter” are all used interchangeably herein and are to be taken in a broad context to refer to regulatory nucleic acid sequences capable of effecting expression of the sequences to which they are ligated. The term “promoter” typically refers to a nucleic acid control sequence located upstream from the transcriptional start of a gene and which is involved in recognising and binding of RNA polymerase and other proteins, thereby directing transcription of an operably linked nucleic acid. Encompassed by the aforementioned terms are transcriptional regulatory sequences derived from a classical eukaryotic genomic gene (including the TATA box which is required for accurate transcription initiation, with or without a CCAAT box sequence) and additional regulatory elements (i.e. upstream activating sequences, enhancers and silencers) which alter gene expression in response to developmental and/or external stimuli, or in a tissue-specific manner. Also included within the term is a transcriptional regulatory sequence of a classical prokaryotic gene, in which case it may include a −35 box sequence and/or −10 box transcriptional regulatory sequences. The term “regulatory element” also encompasses a synthetic fusion molecule or derivative that confers, activates or enhances expression of a nucleic acid molecule in a cell, tissue or organ.

[0075] A “plant promoter” comprises regulatory elements, which mediate the expression of a coding sequence segment in plant cells. Accordingly, a plant promoter need not be of plant origin, but may originate from viruses or micro-organisms, for example from viruses which attack plant cells. The “plant promoter” can also originate from a plant cell, e.g. from the plant which is transformed with the nucleic acid sequence to be expressed in the inventive process and described herein. This also applies to other “plant” regulatory signals, such as “plant” terminators. The promoters upstream of the nucleotide sequences useful in the methods of the present invention can be modified by one or more nucleotide substitution(s), insertion(s) and/or deletion(s) without interfering with the functionality or activity of either the promoters, the open reading frame (ORF) or the 3′-regulatory region such as terminators or other 3′ regulatory regions which are located away from the ORF. It is furthermore possible that the activity of the promoters is increased by modification of their sequence, or that they are replaced completely by more active promoters, even promoters from heterologous organisms. For expression in plants, the nucleic acid molecule must, as described above, be linked operably to or comprise a suitable promoter which expresses the gene at the right point in time and with the required spatial expression pattern.

[0076] For the identification of functionally equivalent promoters, the promoter strength and/or expression pattern of a candidate promoter may be analysed for example by operably linking the promoter to a reporter gene and assaying the expression level and pattern of the reporter gene in various tissues of the plant. Suitable well-known reporter genes include for example beta-glucuronidase or beta-galactosidase. The promoter activity is assayed by measuring the enzymatic activity of the beta-glucuronidase or beta-galactosidase. The promoter strength and/or expression pattern may then be compared to that of a reference promoter (such as the one used in the methods of the present invention). Alternatively, promoter strength may be assayed by quantifying mRNA levels or by comparing mRNA levels of the nucleic acid used in the methods of the present invention, with mRNA levels of housekeeping genes such as 18S rRNA, using methods known in the art, such as Northern blotting with densitometric analysis of autoradiograms, quantitative real-time PCR or RT-PCR (Heid et al., 1996 Genome Methods 6: 986-994). Generally by “weak promoter” is intended a promoter that drives expression of a coding sequence at a low level. By “low level” is intended at levels of about 1/10,000 transcripts to about 1/100,000 transcripts, to about 1/500,0000 transcripts per cell. Conversely, a “strong promoter” drives expression of a coding sequence at high level, or at about 1/10 transcripts to about 1/100 transcripts to about 1/1000 transcripts per cell. Generally, by “medium strength promoter” is intended a promoter that drives expression of a coding sequence at a lower level than a strong promoter, in particular at a level that is in all instances below that obtained when under the control of a 35S CaMV promoter.

[0077] Operably Linked

[0078] The term “operably linked” or “functionally linked” is used interchangeably and, as used herein, refers to a functional linkage between the promoter sequence and the gene of interest, such that the promoter sequence is able to direct transcription of the gene of interest.

[0079] The term “functional linkage” or “functionally linked” with respect to regulatory elements, is to be understood as meaning, for example, the sequential arrangement of a regulatory element (e.g. a promoter) with a nucleic acid sequence to be expressed and, if appropriate, further regulatory elements (such as e.g., a terminator, NEENA or a RENA) in such a way that each of the regulatory elements can fulfil its intended function to allow, modify, facilitate or otherwise influence expression of said nucleic acid sequence. As a synonym the wording “operable linkage” or “operably linked” may be used. The expression may result, depending on the arrangement of the nucleic acid sequences, in sense or antisense RNA. To this end, direct linkage in the chemical sense is not necessarily required. Genetic control sequences such as, for example, enhancer sequences, can also exert their function on the target sequence from positions which are further away, or indeed from other DNA molecules. Preferred arrangements are those in which the nucleic acid sequence to be expressed is recombinantly positioned behind the sequence acting as promoter, so that the two sequences are linked covalently to each other. The distance between the promoter sequence and the recombinant nucleic acid sequence to be expressed is preferably less than 200 base pairs, especially preferably less than 100 base pairs, very especially preferably less than 50 base pairs. In a preferred embodiment, the nucleic acid sequence to be transcribed is located behind the promoter in such a way that the transcription start is identical with the desired beginning of the chimeric RNA of the invention. Functional linkage, and an expression construct, can be generated by means of customary recombination and cloning techniques as described (e.g., in Maniatis T, Fritsch E F and Sambrook J (1989) Molecular Cloning: A Laboratory Manual, 2nd Ed., Cold Spring Harbor Laboratory, Cold Spring Harbor (N.Y.); Silhavy et al. (1984) Experiments with Gene Fusions, Cold Spring Harbor Laboratory, Cold Spring Harbor (N.Y.); Ausubel et al. (1987) Current Protocols in Molecular Biology, Greene Publishing Assoc. and Wiley Interscience; Gelvin et al. (Eds) (1990) Plant Molecular Biology Manual; Kluwer Academic Publisher, Dordrecht, The Netherlands). However, further sequences, which, for example, act as a linker with specific cleavage sites for restriction enzymes, or as a signal peptide, may also be positioned between the two sequences. The insertion of sequences may also lead to the expression of fusion proteins. Preferably, the expression construct, consisting of a linkage of a regulatory region for example a promoter and nucleic acid sequence to be expressed, can exist in a vector-integrated form and be inserted into a plant genome, for example by transformation.

[0080] Constitutive Promoter

[0081] A “constitutive promoter” refers to a promoter that is transcriptionally active during most, but not necessarily all, phases of growth and development and under most environmental conditions, in at least one cell, tissue or organ. Table 2a below gives examples of constitutive promoters.

TABLE 2a
Examples of constitutive promoters

| Gene Source | Reference |
|---|---|
| Actin | McElroy et al, Plant Cell, 2: 163-171, 1990 |
| HMGP | WO 2004/070039 |
| CAMV 35S | Odell et al, Nature, 313: 810-812, 1985 |
| CaMV 19S | Nilsson et al., Physiol. Plant. 100: 456-462, 1997 |
| GOS2 | de Pater et al, Plant J Nov; 2(6): 837-44, 1992, |
| | WO 2004/065596 |
| Ubiquitin | Christensen et al, Plant Mol. Biol. 18: 675-689, 1992 |
| Rice cyclophilin | Buchholz et al, Plant Mol Biol. 25(5): 837-43, 1994 |
| Maize H3 histone | Lepetit et al, Mol. Gen. Genet. 231: 276-285, 1992 |
| Alfalfa H3 histone | Wu et al. Plant Mol. Biol. 11: 641-649, 1988 |
| Actin 2 | An et al, Plant J. 10(1); 107-121, 1996 |
| 34S FMV | Sanger et al., Plant. Mol. Biol., 14, 1990: 433-443 |
| Rubisco small | U.S. Pat. No. 4,962,028 |
| subunit | |
| OCS | Leisner (1988) Proc Natl Acad Sci USA 85(5): 2553 |
| SAD1 | Jain et al., Crop Science, 39 (6), 1999: 1696 |
| SAD2 | Jain et al., Crop Science, 39 (6), 1999: 1696 |
| nos | Shaw et al. (1984) Nucleic Acids Res. 12(20): |
| | 7831-7846 |
| V-ATPase | WO 01/14572 |
| Super promoter | WO 95/14098 |
| G-box proteins | WO 94/12015 |

[0082] Ubiquitous Promoter

[0083] A “ubiquitous promoter” is active in substantially all tissues or cells of an organism.

[0084] Developmentally-Regulated Promoter

[0085] A “developmentally-regulated promoter” is active during certain developmental stages or in parts of the plant that undergo developmental changes.

[0086] Inducible Promoter

[0087] An “inducible promoter” has induced or increased transcription initiation in response to a chemical (for a review see Gatz 1997, Annu. Rev. Plant Physiol. Plant Mol. Biol., 48:89-108), environmental or physical stimulus, or may be “stress-inducible”, i.e. activated when a plant is exposed to various stress conditions, or a “pathogen-inducible” i.e. activated when a plant is exposed to exposure to various pathogens.

[0088] Organ-Specific/Tissue-Specific Promoter

[0089] An “organ-specific” or “tissue-specific promoter” is one that is capable of preferentially initiating transcription in certain organs or tissues, such as the leaves, roots, seed tissue etc. For example, a “root-specific promoter” is a promoter that is transcriptionally active predominantly in plant roots, substantially to the exclusion of any other parts of a plant, whilst still allowing for any leaky expression in these other plant parts. Promoters able to initiate transcription in certain cells only are referred to herein as “cell-specific”.

[0090] Examples of root-specific promoters are listed in Table 2b below:

TABLE 2b
Examples of root-specific promoters

| Gene Source | Reference |
|---|---|
| RCc3 | Plant Mol Biol. 1995 Jan; 27 (2): 237-48 |
| Arabidopsis PHT1 | Koyama et al. J Biosci Bioeng. 2005 Jan; |
| | 99 (1): 38-42.; Mudge et al. (2002, Plant |
| | J. 31: 341) |
| Medicago phosphate | Xiao et al., 2006, Plant Biol (Stuttg). |
| transporter | 2006 Jul; 8 (4): 439-49 |
| Arabidopsis Pyk10 | Nitz et al. (2001) Plant Sci 161 (2): 337- |
| | 346 |
| root-expressible genes | Tingey et al., EMBO J. 6: 1, 1987. |
| tobacco auxin-inducible | Van der Zaal et al., Plant Mol. Biol. 16, |
| gene | 983, 1991. |
| β-tubulin | Oppenheimer, et al., Gene 63: 87, 1988. |
| tobacco root-specific genes | Conkling, et al., Plant Physiol. 93: 1203, |
| | 1990. |
| B. napus G1-3b gene | U.S. Pat. No. 5,401,836 |
| SbPRP1 | Suzuki et al., Plant Mol. Biol. 21: 109- |
| | 119, 1993. |
| LRX1 | Baumberger et al. 2001, Genes & Dev. |
| | 15: 1128 |
| BTG-26 Brassica napus | US 20050044585 |
| LeAMT1 (tomato) | Lauter et al. (1996, PNAS 3: 8139) |
| The LeNRT1-1 (tomato) | Lauter et al. (1996, PNAS 3: 8139) |
| class I patatin gene (potato) | Liu et al., Plant Mol. Biol. 17 (6): 1139- |
| | 1154 |
| KDC1 (Daucus carota) | Downey et al. (2000, J. Biol. Chem. 275: |
| | 39420) |
| TobRB7 gene | W Song (1997) PhD Thesis, North Carolina |
| | State University, Raleigh, NC USA |
| OsRAB5a (rice) | Wang et al. 2002, Plant Sci. 163: 273 |
| ALF5 (Arabidopsis) | Diener et al. (2001, Plant Cell 13: 1625) |
| NRT2; 1Np (N. | Quesada et al. (1997, Plant Mol. Biol. 34: |
| plumbaginifolia) | 265) |

[0091] A “seed-specific promoter” is transcriptionally active predominantly in seed tissue, but not necessarily exclusively in seed tissue (in cases of leaky expression). The seed-specific promoter may be active during seed development and/or during germination. The seed specific promoter may be endosperm/aleurone/embryo specific. Examples of seed-specific promoters (endosperm/aleurone/embryo specific) are shown in Table 2c to Table 2f below. Further examples of seed-specific promoters are given in Qing Qu and Takaiwa (Plant Biotechnol. J. 2, 113-125, 2004), which disclosure is incorporated by reference herein as if fully set forth.

TABLE 2c
Examples of seed-specific promoters

| Gene source | Reference |
|---|---|
| seed-specific genes | Simon et al., Plant Mol. Biol. 5: 191, 1985; |
| | Scofield et al., J. Biol. Chem. 262: 12202, 1987.; |
| | Baszczynski et al., Plant Mol. Biol. 14: 633, 1990. |
| Brazil Nut albumin | Pearson et al., Plant Mol. Biol. 18: 235-245, 1992. |
| legumin | Ellis et al., Plant Mol. Biol. 10: 203-214, 1988. |
| glutelin (rice) | Takaiwa et al., Mol. Gen. Genet. 208: 15-22, 1986; |
| | Takaiwa et al., FEBS Letts. 221: 43-47, 1987. |
| zein | Matzke et al Plant Mol Biol, 14 (3): 323-32 1990 |
| napA | Stalberg et al, Planta 199: 515-519, 1996. |
| wheat LMW and | Mol Gen Genet 216: 81-90, 1989; NAR 17: 461-2, |
| HMW glutenin-1 | 1989 |
| wheat SPA | Albani et al, Plant Cell, 9: 171-184, 1997 |
| wheat α, β, γ-gliadins | EMBO J. 3: 1409-15, 1984 |
| barley Itr1 promoter | Diaz et al. (1995) Mol Gen Genet 248 (5): 592-8 |
| barley B1, C, D, | Theor Appl Gen 98: 1253-62, 1999; Plant J 4: |
| hordein | 343-55, 1993; Mol Gen Genet 250: 750-60, 1996 |
| barley DOF | Mena et al, The Plant Journal, 116 (1): 53-62, 1998 |
| blz2 | EP99106056.7 |
| synthetic promoter | Vicente-Carbajosa et al., Plant J. 13: 629-640, 1998. |
| rice prolamin NRP33 | Wu et al, Plant Cell Physiology 39 (8) 885-889, |
| | 1998 |
| rice a-globulin Glb-1 | Wu et al, Plant Cell Physiology 39 (8) 885-889, |
| | 1998 |
| rice OSH1 | Sato et al, Proc. Natl. Acad. Sci. USA, 93: 8117- |
| | 8122, 1996 |
| rice α-globulin | Nakase et al. Plant Mol. Biol. 33: 513-522, 1997 |
| REB/OHP-1 | |
| rice ADP-glucose | Trans Res 6: 157-68, 1997 |
| pyrophosphorylase | |
| maize ESR gene | Plant J 12: 235-46, 1997 |
| family | |
| sorghum α-kafirin | DeRose et al., Plant Mol. Biol 32: 1029-35, 1996 |
| KNOX | Postma-Haarsma et al, Plant Mol. Biol. 39: 257- |
| | 71, 1999 |
| rice oleosin | Wu et al, J. Biochem. 123: 386, 1998 |
| sunflower oleosin | Cummins et al., Plant Mol. Biol. 19: 873-876, |
| | 1992 |
| PRO0117, putative | WO 2004/070039 |
| rice 40S ribosomal | |
| protein | |
| PRO0136, rice | unpublished |
| alanine | |
| aminotransferase | |
| PRO0147, trypsin | unpublished |
| inhibitor ITR1 | |
| (barley) | |
| PRO0151, rice | WO 2004/070039 |
| WSI18 | |
| PRO0175, rice | WO 2004/070039 |
| RAB21 | |
| PRO005 | WO 2004/070039 |
| PRO0095 | WO 2004/070039 |
| α-amylase (Amy32b) | Lanahan et al, Plant Cell 4: 203-211, 1992; |
| | Skriver et al, Proc Natl Acad Sci USA 88: 7266- |
| | 7270, 1991 |
| cathepsin β-like gene | Cejudo et al, Plant Mol Biol 20: 849-856, 1992 |
| Barley Ltp2 | Kalla et al., Plant J. 6: 849-60, 1994 |
| Chi26 | Leah et al., Plant J. 4: 579-89, 1994 |
| Maize B-Peru | Selinger et al., Genetics 149; 1125-38, 1998 |

TABLE 2d
examples of endosperm-specific promoters

| Gene source | Reference |
|---|---|
| glutelin (rice) | Takaiwa et al. (1986) Mol Gen Genet 208: 15-22; |
| | Takaiwa et al. (1987) FEBS Letts. 221: 43-47 |
| zein | Matzke et al., (1990) Plant Mol Biol 14 (3): 323-32 |
| wheat LMW and | Colot et al. (1989) Mol Gen Genet 216: 81-90, |
| HMW glutenin-1 | Anderson et al. (1989) NAR 17: 461-2 |
| wheat SPA | Albani et al. (1997) Plant Cell 9: 171-184 |
| wheat gliadins | Rafalski et al. (1984) EMBO 3: 1409-15 |
| barley Itr1 promoter | Diaz et al. (1995) Mol Gen Genet 248 (5): 592-8 |
| barley B1, C, D, | Cho et al. (1999) Theor Appl Genet 98: 1253-62; |
| hordein | Muller et al. (1993) Plant J 4: 343-55; |
| | Sorenson et al. (1996) Mol Gen Genet 250: 750-60 |
| barley DOF | Mena et al, (1998) Plant J 116 (1): 53-62 |
| blz2 | Onate et al. (1999) J Biol Chem 274 (14): 9175-82 |
| synthetic promoter | Vicente-Carbajosa et al. (1998) Plant J 13: 629-640 |
| rice prolamin NRP33 | Wu et al, (1998) Plant Cell Physiol 39 (8) 885-889 |
| rice globulin Glb-1 | Wu et al. (1998) Plant Cell Physiol 39 (8) 885-889 |
| rice globulin REB/ | Nakase et al. (1997) Plant Molec Biol 33: 513-522 |
| OHP-1 | |
| rice ADP-glucose | Russell et al. (1997) Trans Res 6: 157-68 |
| pyrophosphorylase | |
| maize ESR gene | Opsahl-Ferstad et al. (1997) Plant J 12: 235-46 |
| family | |
| sorghum kafirin | DeRose et al. (1996) Plant Mol Biol 32: 1029-35 |

TABLE 2e
Examples of embryo specific promoters:

| Gene source | Reference |
|---|---|
| rice OSH1 | Sato et al, Proc. Natl. Acad. Sci. USA, 93: 8117-8122, 1996 |
| KNOX | Postma-Haarsma et al, Plant Mol. Biol. 39: 257-71, 1999 |
| PRO0151 | WO 2004/070039 |
| PRO0175 | WO 2004/070039 |
| PR0005 | WO 2004/070039 |
| PRO0095 | WO 2004/070039 |

TABLE 2f
Examples of aleurone-specific promoters:

| Gene source | Reference |
|---|---|
| α-amylase (Amy32b) | Lanahan et al, Plant Cell 4: 203-211, 1992; |
| | Skriver et al, Proc Natl Acad Sci USA 88: 7266- |
| | 7270, 1991 |
| cathepsin β-like gene | Cejudo et al, Plant Mol Biol 20: 849-856, 1992 |
| Barley Ltp2 | Kalla et al., Plant J. 6: 849-60, 1994 |
| Chi26 | Leah et al., Plant J. 4: 579-89, 1994 |
| Maize B-Peru | Selinger et al., Genetics 149; 1125-38, 1998 |

[0092] A “green tissue-specific promoter” as defined herein is a promoter that is transcriptionally active predominantly in green tissue, substantially to the exclusion of any other parts of a plant, whilst still allowing for any leaky expression in these other plant parts.

[0093] Examples of green tissue-specific promoters which may be used to perform the methods of the invention are shown in Table 2g below.

TABLE 2g
Examples of green tissue-specific promoters

| Gene | Expression | Reference |
|---|---|---|
| Maize Orthophosphate | Leaf specific | Fukavama et al., Plant Physiol. |
| dikinase | | 2001 Nov; 127 (3): 1136-46 |
| Maize Phosphoenolpyruvate | Leaf specific | Kausch et al., Plant Mol Biol. |
| carboxylase | | 2001 Jan; 45 (1): 1-15 |
| Rice Phosphoenolpyruvate | Leaf specific | Lin et al., 2004 DNA Seq. 2004 |
| carboxylase | | Aug; 15 (4): 269-76 |
| Rice small subunit Rubisco | Leaf specific | Nomura et al., Plant Mol Biol. |
| | | 2000 Sep; 44 (1): 99-106 |
| rice beta expansin EXBP9 | Shoot | WO 2004/070039 |
| | specific | |
| Pigeonpea small subunit | Leaf specific | Panguluri et al., Indian J Exp |
| Rubisco | | Biol. 2005 Apr; 43 (4): 369-72 |
| Pea RBCS3A | Leaf specific | |

[0094] Another example of a tissue-specific promoter is a meristem-specific promoter, which is transcriptionally active predominantly in meristematic tissue, substantially to the exclusion of any other parts of a plant, whilst still allowing for any leaky expression in these other plant parts. Examples of green meristem-specific promoters which may be used to perform the methods of the invention are shown in Table 2h below.

TABLE 2h
Examples of meristem-specific promoters

| Gene source | Expression pattern | Reference |
|---|---|---|
| rice OSH1 | Shoot apical meristem, | Sato et al. (1996) Proc. |
| | from embryo globular | Natl. Acad. Sci. USA, 93: |
| | stage to seedling stage | 8117-8122 |
| Rice metallothionein | Meristem specific | BAD87835.1 |
| WAK1 & WAK 2 | Shoot and root apical | Wagner & Kohorn (2001) |
| | meristems, and in | Plant Cell 13 (2): 303-318 |
| | expanding leaves and | |
| | sepals | |

[0095] Terminator

[0096] The term “terminator” encompasses a control sequence which is a DNA sequence at the end of a transcriptional unit which signals 3′ processing and polyadenylation of a primary transcript and termination of transcription. The terminator can be derived from the natural gene, from a variety of other plant genes, or from T-DNA. The terminator to be added may be derived from, for example, the nopaline synthase or octopine synthase genes, or alternatively from another plant gene, or less preferably from any other eukaryotic gene.

[0097] Selectable Marker (Gene)/Reporter Gene

[0098] “Selectable marker”, “selectable marker gene” or “reporter gene” includes any gene that confers a phenotype on a cell in which it is expressed to facilitate the identification and/or selection of cells that are transfected or transformed with a nucleic acid construct of the invention. These marker genes enable the identification of a successful transfer of the nucleic acid molecules via a series of different principles. Suitable markers may be selected from markers that confer antibiotic or herbicide resistance, that introduce a new metabolic trait or that allow visual selection. Examples of selectable marker genes include genes conferring resistance to antibiotics (such as nptll that phosphorylates neomycin and kanamycin, or hpt, phosphorylating hygromycin, or genes conferring resistance to, for example, bleomycin, streptomycin, tetracyclin, chloramphenicol, ampicillin, gentamycin, geneticin (G418), spectinomycin or blasticidin), to herbicides (for example bar which provides resistance to Basta®; aroA or gox providing resistance against glyphosate, or the genes conferring resistance to, for example, imidazolinone, phosphinothricin or sulfonylurea), or genes that provide a metabolic trait (such as manA that allows plants to use mannose as sole carbon source or xylose isomerase for the utilisation of xylose, or antinutritive markers such as the resistance to 2-deoxyglucose). Expression of visual marker genes results in the formation of colour (for example β-glucuronidase, GUS or β-galactosidase with its coloured substrates, for example X-Gal), luminescence (such as the luciferin/luceferase system) or fluorescence (Green Fluorescent Protein, GFP, and derivatives thereof). This list represents only a small number of possible markers. The skilled worker is familiar with such markers. Different markers are preferred, depending on the organism and the selection method.

[0099] It is known that upon stable or transient integration of nucleic acids into plant cells, only a minority of the cells takes up the foreign DNA and, if desired, integrates it into its genome, depending on the expression vector used and the transfection technique used. To identify and select these integrants, a gene coding for a selectable marker (such as the ones described above) is usually introduced into the host cells together with the gene of interest. These markers can for example be used in mutants in which these genes are not functional by, for example, deletion by conventional methods. Furthermore, nucleic acid molecules encoding a selectable marker can be introduced into a host cell on the same vector that comprises the sequence encoding the polypeptides of the invention or used in the methods of the invention, or else in a separate vector. Cells which have been stably transfected with the introduced nucleic acid can be identified for example by selection (for example, cells which have integrated the selectable marker survive whereas the other cells die).

[0100] Since the marker genes, particularly genes for resistance to antibiotics and herbicides, are no longer required or are undesired in the transgenic host cell once the nucleic acids have been introduced successfully, the process according to the invention for introducing the nucleic acids advantageously employs techniques which enable the removal or excision of these marker genes. One such a method is what is known as co-transformation. The co-transformation method employs two vectors simultaneously for the transformation, one vector bearing the nucleic acid according to the invention and a second bearing the marker gene(s). A large proportion of transformants receives or, in the case of plants, comprises (up to 40% or more of the transformants), both vectors. In case of transformation with Agrobacteria, the transformants usually receive only a part of the vector, i.e. the sequence flanked by the T-DNA, which usually represents the expression cassette. The marker genes can subsequently be removed from the transformed plant by performing crosses. In another method, marker genes integrated into a transposon are used for the transformation together with desired nucleic acid (known as the Ac/Ds technology). The transformants can be crossed with a transposase source or the transformants are transformed with a nucleic acid construct conferring expression of a transposase, transiently or stable. In some cases (approx. 10%), the transposon jumps out of the genome of the host cell once transformation has taken place successfully and is lost. In a further number of cases, the transposon jumps to a different location. In these cases the marker gene must be eliminated by performing crosses. In microbiology, techniques were developed which make possible, or facilitate, the detection of such events. A further advantageous method relies on what is known as recombination systems; whose advantage is that elimination by crossing can be dispensed with. The best-known system of this type is what is known as the Cre/lox system. Cre1 is a recombinase that removes the sequences located between the loxP sequences. If the marker gene is integrated between the loxP sequences, it is removed once transformation has taken place successfully, by expression of the recombinase. Further recombination systems are the HIN/HIX, FLP/FRT and REP/STB system (Tribble et al., J. Biol. Chem., 275, 2000: 22255-22267; Velmurugan et al., J. Cell Biol., 149, 2000: 553-566). A site-specific integration into the plant genome of the nucleic acid sequences according to the invention is possible. Naturally, these methods can also be applied to microorganisms such as yeast, fungi or bacteria.

[0101] Transgenic/Transgene/Recombinant

[0102] For the purposes of the invention, “transgenic”, “transgene” or “recombinant” means with regard to, for example, a nucleic acid sequence, an expression cassette, gene construct or a vector comprising the nucleic acid sequence or an organism transformed with the nucleic acid sequences, expression cassettes or vectors according to the invention, all those constructions brought about by recombinant methods in which either
[0103] a) the nucleic acid sequences encoding proteins useful in the methods of the invention, or
[0104] b) genetic control sequence(s) which is operably linked with the nucleic acid sequence according to the invention, for example a promoter, or
[0105] c) a) and b)
   are not located in their natural genetic environment or have been modified by recombinant methods, it being possible for the modification to take the form of, for example, a substitution, addition, deletion, inversion or insertion of one or more nucleotide residues. The natural genetic environment is understood as meaning the natural genomic or chromosomal locus in the original plant or the presence in a genomic library. In the case of a genomic library, the natural genetic environment of the nucleic acid sequence is preferably retained, at least in part. The environment flanks the nucleic acid sequence at least on one side and has a sequence length of at least 50 bp, preferably at least 500 bp, especially preferably at least 1000 bp, most preferably at least 5000 bp. A naturally occurring expression cassette—for example the naturally occurring combination of the natural promoter of the nucleic acid sequences with the corresponding nucleic acid sequence encoding a polypeptide useful in the methods of the present invention, as defined above—becomes a transgenic expression cassette when this expression cassette is modified by non-natural, synthetic (“artificial”) methods such as, for example, mutagenic treatment. Suitable methods are described, for example, in U.S. Pat. No. 5,565,350 or WO 00/15815.

[0106] A transgenic plant for the purposes of the invention is thus understood as meaning, as above, that the nucleic acids used in the method of the invention are not present in, or originating from, the genome of said plant, or are present in the genome of said plant but not at their natural locus in the genome of said plant, it being possible for the nucleic acids to be expressed homologously or heterologously. However, as mentioned, transgenic also means that, while the nucleic acids according to the invention or used in the inventive method are at their natural position in the genome of a plant, the sequence has been modified with regard to the natural sequence, and/or that the regulatory sequences of the natural sequences have been modified. Transgenic is preferably understood as meaning the expression of the nucleic acids according to the invention at an unnatural locus in the genome, i.e. homologous or, preferably, heterologous expression of the nucleic acids takes place. Preferred transgenic plants are mentioned herein.

[0107] It shall further be noted that in the context of the present invention, the term “isolated nucleic acid” or “isolated polypeptide” may in some instances be considered as a synonym for a “recombinant nucleic acid” or a “recombinant polypeptide”, respectively and refers to a nucleic acid or polypeptide that is not located in its natural genetic environment and/or that has been modified by recombinant methods. An isolated nucleic acid sequence or isolated nucleic acid molecule is one that is not in its native surrounding or its native nucleic acid neighbourhood, yet it is physically and functionally connected to other nucleic acid sequences or nucleic acid molecules and is found as part of a nucleic acid construct, vector sequence or chromosome.

[0108] Modulation

[0109] The term “modulation” means in relation to expression or gene expression, a process in which the expression level is changed by said gene expression in comparison to the control plant, the expression level may be increased or decreased. The original, unmodulated expression may be of any kind of expression of a structural RNA (rRNA, tRNA) or mRNA with subsequent translation. For the purposes of this invention, the original unmodulated expression may also be absence of any expression. The term “modulating the activity” or the term “modulating expression” with respect to the proteins or nucleic acids used in the methods of the invention shall mean any change of the expression which leads to enhanced yield-related traits in the plants. The expression can increase from zero (absence of, or immeasurable expression) to a certain amount, or can decrease from a certain amount to immeasurable small amounts or zero.

[0110] Expression

[0111] The term “expression” or “gene expression” means the transcription of a specific gene or specific genes or specific genetic construct. The term “expression” or “gene expression” in particular means the transcription of a gene or genes or genetic construct into structural RNA (rRNA, tRNA) or mRNA with or without subsequent translation of the latter into a protein. The process includes transcription of DNA and processing of the resulting mRNA product.

[0112] Increased Expression/Overexpression

[0113] The term “increased expression” or “overexpression” as used herein means any form of expression that is additional to the original wild-type expression level. For the purposes of this invention, the original wild-type expression level might also be zero, i.e. absence of expression or immeasurable expression. Reference herein to “increased expression” is taken to mean an increase in gene expression and/or, as far as referring to polypeptides, increased polypeptide levels and/or increased polypeptide activity, relative to control plants. The increase in expression is in increasing order of preference at least 10%, 20%, 30%, 40% or 50%, 60%, 70%, 80%, 85%, 90%, or 95%, 96%, 97%, 98%, 99% or even more compared to that of control plants.

[0114] Methods for increasing expression of genes or gene products are well documented in the art and include, for example, overexpression driven by appropriate promoters, the use of transcription enhancers or translation enhancers. Isolated nucleic acids which serve as promoter or enhancer elements may be introduced in an appropriate position (typically upstream) of a non-heterologous form of a polynucleotide so as to upregulate expression of a nucleic acid encoding the polypeptide of interest. For example, endogenous promoters may be altered in vivo by mutation, deletion, and/or substitution (see, Kmiec, U.S. Pat. No. 5,565,350; Zarling et al., WO9322443), or isolated promoters may be introduced into a plant cell in the proper orientation and distance from a gene of the present invention so as to control the expression of the gene.

[0115] If polypeptide expression is desired, it is generally desirable to include a polyadenylation region at the 3′-end of a polynucleotide coding region. The polyadenylation region can be derived from the natural gene, from a variety of other plant genes, or from T-DNA. The 3′ end sequence to be added may be derived from, for example, the nopaline synthase or octopine synthase genes, or alternatively from another plant gene, or less preferably from any other eukaryotic gene.

[0116] An intron sequence may also be added to the 5′ untranslated region (UTR) or the coding sequence of the partial coding sequence to increase the amount of the mature message that accumulates in the cytosol. Inclusion of a spliceable intron in the transcription unit in both plant and animal expression constructs has been shown to increase gene expression at both the mRNA and protein levels up to 1000-fold (Buchman and Berg (1988) Mol. Cell biol. 8: 4395-4405; Callis et al. (1987) Genes Dev 1:1183-1200). Such intron enhancement of gene expression is typically greatest when placed near the 5′ end of the transcription unit. Use of the maize introns Adh1-S intron 1, 2, and 6, the Bronze-1 intron are known in the art. For general information see: The Maize Handbook, Chapter 116, Freeling and Walbot, Eds., Springer, N.Y. (1994).

[0117] To obtain increased expression or overexpression of a polypeptide most commonly the nucleic acid encoding this polypeptide is overexpressed in sense orientation with a polyadenylation signal. Introns or other enhancing elements may be used in addition to a promoter suitable for driving expression with the intended expression pattern.

[0118] Decreased Expression

[0119] Reference herein to “decreased expression” or “reduction or substantial elimination” of expression is taken to mean a decrease in endogenous gene expression and/or polypeptide levels and/or polypeptide activity relative to control plants. The reduction or substantial elimination is in increasing order of preference at least 10%, 20%, 30%, 40% or 50%, 60%, 70%, 80%, 85%, 90%, or 95%, 96%, 97%, 98%, 99% or more reduced compared to that of control plants.

[0120] For the reduction or substantial elimination of expression an endogenous gene in a plant, a sufficient length of substantially contiguous nucleotides of a nucleic acid sequence is required. In order to perform gene silencing, this may be as little as 20, 19, 18, 17, 16, 15, 14, 13, 12, 11, 10 or fewer nucleotides, alternatively this may be as much as the entire gene (including the 5′ and/or 3′ UTR, either in part or in whole). The stretch of substantially contiguous nucleotides may be derived from the nucleic acid encoding the protein of interest (target gene), or from any nucleic acid capable of encoding an orthologue, paralogue or homologue of the protein of interest. Preferably, the stretch of substantially contiguous nucleotides is capable of forming hydrogen bonds with the target gene (either sense or antisense strand), more preferably, the stretch of substantially contiguous nucleotides has, in increasing order of preference, 50%, 60%, 70%, 80%, 85%, 90%, 95%, 96%, 97%, 98%, 99%, 100% sequence identity to the target gene (either sense or antisense strand). A nucleic acid sequence encoding a (functional) polypeptide is not a requirement for the various methods discussed herein for the reduction or substantial elimination of expression of an endogenous gene.

[0121] This reduction or substantial elimination of expression may be achieved using routine tools and techniques. A preferred method for the reduction or substantial elimination of endogenous gene expression is by introducing, preferably by recombinant methods, and expressing in a plant a genetic construct into which the nucleic acid (in this case a stretch of substantially contiguous nucleotides derived from the gene of interest, or from any nucleic acid capable of encoding an orthologue, paralogue or homologue of any one of the protein of interest) is cloned as an inverted repeat (in part or completely), separated by a spacer (non-coding DNA).

[0122] In such a preferred method, expression of the endogenous gene is reduced or substantially eliminated through RNA-mediated silencing using an inverted repeat of a nucleic acid or a part thereof (in this case a stretch of substantially contiguous nucleotides derived from the gene of interest, or from any nucleic acid capable of encoding an orthologue, paralogue or homologue of the protein of interest), preferably capable of forming a hairpin structure. The inverted repeat is cloned in an expression vector comprising control sequences. A non-coding DNA nucleic acid sequence (a spacer, for example a matrix attachment region fragment (MAR), an intron, a polylinker, etc.) is located between the two inverted nucleic acids forming the inverted repeat. After transcription of the inverted repeat, a chimeric RNA with a self-complementary structure is formed (partial or complete). This double-stranded RNA structure is referred to as the hairpin RNA (hpRNA). The hpRNA is processed by the plant into siRNAs that are incorporated into an RNA-induced silencing complex (RISC). The RISC further cleaves the mRNA transcripts, thereby substantially reducing the number of mRNA transcripts to be translated into polypeptides. For further general details see for example, Grierson et al. (1998) WO 98/53083; Waterhouse et al. (1999) WO 99/53050).

[0123] Performance of the methods of the invention does not rely on introducing and expressing in a plant a genetic construct into which the nucleic acid is cloned as an inverted repeat, but any one or more of several well-known “gene silencing” methods may be used to achieve the same effects.

[0124] One such method for the reduction of endogenous gene expression is RNA-mediated silencing of gene expression (downregulation). Silencing in this case is triggered in a plant by a double stranded RNA sequence (dsRNA) that is substantially similar to the target endogenous gene. This dsRNA is further processed by the plant into about 20 to about 26 nucleotides called short interfering RNAs (siRNAs). The siRNAs are incorporated into an RNA-induced silencing complex (RISC) that cleaves the mRNA transcript of the endogenous target gene, thereby substantially reducing the number of mRNA transcripts to be translated into a polypeptide. Preferably, the double stranded RNA sequence corresponds to a target gene.

[0125] Another example of an RNA silencing method involves the introduction of nucleic acid sequences or parts thereof (in this case a stretch of substantially contiguous nucleotides derived from the gene of interest, or from any nucleic acid capable of encoding an orthologue, paralogue or homologue of the protein of interest) in a sense orientation into a plant. “Sense orientation” refers to a DNA sequence that is homologous to an mRNA transcript thereof. Introduced into a plant would therefore be at least one copy of the nucleic acid sequence. The additional nucleic acid sequence will reduce expression of the endogenous gene, giving rise to a phenomenon known as co-suppression. The reduction of gene expression will be more pronounced if several additional copies of a nucleic acid sequence are introduced into the plant, as there is a positive correlation between high transcript levels and the triggering of co-suppression.

[0126] Another example of an RNA silencing method involves the use of antisense nucleic acid sequences. An “antisense” nucleic acid sequence comprises a nucleotide sequence that is complementary to a “sense” nucleic acid sequence encoding a protein, i.e. complementary to the coding strand of a double-stranded cDNA molecule or complementary to an mRNA transcript sequence. The antisense nucleic acid sequence is preferably complementary to the endogenous gene to be silenced. The complementarity may be located in the “coding region” and/or in the “non-coding region” of a gene. The term “coding region” refers to a region of the nucleotide sequence comprising codons that are translated into amino acid residues. The term “non-coding region” refers to 5′ and 3′ sequences that flank the coding region that are transcribed but not translated into amino acids (also referred to as 5′ and 3′ untranslated regions).

[0127] Antisense nucleic acid sequences can be designed according to the rules of Watson and Crick base pairing. The antisense nucleic acid sequence may be complementary to the entire nucleic acid sequence (in this case a stretch of substantially contiguous nucleotides derived from the gene of interest, or from any nucleic acid capable of encoding an orthologue, paralogue or homologue of the protein of interest), but may also be an oligonucleotide that is antisense to only a part of the nucleic acid sequence (including the mRNA 5′ and 3′ UTR). For example, the antisense oligonucleotide sequence may be complementary to the region surrounding the translation start site of an mRNA transcript encoding a polypeptide. The length of a suitable antisense oligonucleotide sequence is known in the art and may start from about 50, 45, 40, 35, 30, 25, 20, 15 or 10 nucleotides in length or less. An antisense nucleic acid sequence according to the invention may be constructed using chemical synthesis and enzymatic ligation reactions using methods known in the art. For example, an antisense nucleic acid sequence (e.g., an antisense oligonucleotide sequence) may be chemically synthesized using naturally occurring nucleotides or variously modified nucleotides designed to increase the biological stability of the molecules or to increase the physical stability of the duplex formed between the antisense and sense nucleic acid sequences, e.g., phosphorothioate derivatives and acridine substituted nucleotides may be used. Examples of modified nucleotides that may be used to generate the antisense nucleic acid sequences are well known in the art. Known nucleotide modifications include methylation, cyclization and ‘caps’ and substitution of one or more of the naturally occurring nucleotides with an analogue such as inosine. Other modifications of nucleotides are well known in the art.

[0128] The antisense nucleic acid sequence can be produced biologically using an expression vector into which a nucleic acid sequence has been subcloned in an antisense orientation (i.e., RNA transcribed from the inserted nucleic acid will be of an antisense orientation to a target nucleic acid of interest). Preferably, production of antisense nucleic acid sequences in plants occurs by means of a stably integrated nucleic acid construct comprising a promoter, an operably linked antisense oligonucleotide, and a terminator.

[0129] The nucleic acid molecules used for silencing in the methods of the invention (whether introduced into a plant or generated in situ) hybridize with or bind to mRNA transcripts and/or genomic DNA encoding a polypeptide to thereby inhibit expression of the protein, e.g., by inhibiting transcription and/or translation. The hybridization can be by conventional nucleotide complementarity to form a stable duplex, or, for example, in the case of an antisense nucleic acid sequence which binds to DNA duplexes, through specific interactions in the major groove of the double helix. Antisense nucleic acid sequences may be introduced into a plant by transformation or direct injection at a specific tissue site. Alternatively, antisense nucleic acid sequences can be modified to target selected cells and then administered systemically. For example, for systemic administration, antisense nucleic acid sequences can be modified such that they specifically bind to receptors or antigens expressed on a selected cell surface, e.g., by linking the antisense nucleic acid sequence to peptides or antibodies which bind to cell surface receptors or antigens. The antisense nucleic acid sequences can also be delivered to cells using the vectors described herein.

[0130] According to a further aspect, the antisense nucleic acid sequence is an a-anomeric nucleic acid sequence. An a-anomeric nucleic acid sequence forms specific double-stranded hybrids with complementary RNA in which, contrary to the usual b-units, the strands run parallel to each other (Gaultier et al. (1987) Nucl Ac Res 15: 6625-6641). The antisense nucleic acid sequence may also comprise a 2′-o-methylribonucleotide (Inoue et al. (1987) Nucl Ac Res 15, 6131-6148) or a chimeric RNA-DNA analogue (Inoue et al. (1987) FEBS Lett. 215, 327-330).

[0131] The reduction or substantial elimination of endogenous gene expression may also be performed using ribozymes. Ribozymes are catalytic RNA molecules with ribonuclease activity that are capable of cleaving a single-stranded nucleic acid sequence, such as an mRNA, to which they have a complementary region. Thus, ribozymes (e.g., hammerhead ribozymes (described in Haselhoff and Gerlach (1988) Nature 334, 585-591) can be used to catalytically cleave mRNA transcripts encoding a polypeptide, thereby substantially reducing the number of mRNA transcripts to be translated into a polypeptide. A ribozyme having specificity for a nucleic acid sequence can be designed (see for example: Cech et al. U.S. Pat. No. 4,987,071; and Cech et al. U.S. Pat. No. 5,116,742). Alternatively, mRNA transcripts corresponding to a nucleic acid sequence can be used to select a catalytic RNA having a specific ribonuclease activity from a pool of RNA molecules (Bartel and Szostak (1993) Science 261, 1411-1418). The use of ribozymes for gene silencing in plants is known in the art (e.g., Atkins et al. (1994) WO 94/00012; Lenne et al. (1995) WO 95/03404; Lutziger et al. (2000) WO 00/00619; Prinsen et al. (1997) WO 97/13865 and Scott et al. (1997) WO 97/38116).

[0132] Gene silencing may also be achieved by insertion mutagenesis (for example, T-DNA insertion or transposon insertion) or by strategies as described by, among others, Angell and Baulcombe ((1999) Plant J 20(3): 357-62), (Amplicon VIGS WO 98/36083), or Baulcombe (WO 99/15682).

[0133] Gene silencing may also occur if there is a mutation on an endogenous gene and/or a mutation on an isolated gene/nucleic acid subsequently introduced into a plant. The reduction or substantial elimination may be caused by a non-functional polypeptide. For example, the polypeptide may bind to various interacting proteins; one or more mutation(s) and/or truncation(s) may therefore provide for a polypeptide that is still able to bind interacting proteins (such as receptor proteins) but that cannot exhibit its normal function (such as signaling ligand).

[0134] A further approach to gene silencing is by targeting nucleic acid sequences complementary to the regulatory region of the gene (e.g., the promoter and/or enhancers) to form triple helical structures that prevent transcription of the gene in target cells. See Helene, C., Anticancer Drug Res. 6, 569-84, 1991; Helene et al., Ann. N.Y. Acad. Sci. 660, 27-36 1992; and Maher, L. J. Bioassays 14, 807-15, 1992.

[0135] Other methods, such as the use of antibodies directed to an endogenous polypeptide for inhibiting its function in planta, or interference in the signaling pathway in which a polypeptide is involved, will be well known to the skilled man. In particular, it can be envisaged that manmade molecules may be useful for inhibiting the biological function of a target polypeptide, or for interfering with the signaling pathway in which the target polypeptide is involved.

[0136] Alternatively, a screening program may be set up to identify in a plant population natural variants of a gene, which variants encode polypeptides with reduced activity. Such natural variants may also be used for example, to perform homologous recombination.

[0137] Artificial and/or natural microRNAs (miRNAs) may be used to knock out gene expression and/or mRNA translation. Endogenous miRNAs are single stranded small RNAs of typically 19-24 nucleotides long. They function primarily to regulate gene expression and/or mRNA translation. Most plant microRNAs (miRNAs) have perfect or near-perfect complementarity with their target sequences. However, there are natural targets with up to five mismatches. They are processed from longer non-coding RNAs with characteristic fold-back structures by double-strand specific RNases of the Dicer family. Upon processing, they are incorporated in the RNA-induced silencing complex (RISC) by binding to its main component, an Argonaute protein. MiRNAs serve as the specificity components of RISC, since they base-pair to target nucleic acids, mostly mRNAs, in the cytoplasm. Subsequent regulatory events include target mRNA cleavage and destruction and/or translational inhibition. Effects of miRNA overexpression are thus often reflected in decreased mRNA levels of target genes.

[0138] Artificial microRNAs (amiRNAs), which are typically 21 nucleotides in length, can be genetically engineered specifically to negatively regulate gene expression of single or multiple genes of interest. Determinants of plant microRNA target selection are well known in the art. Empirical parameters for target recognition have been defined and can be used to aid in the design of specific amiRNAs, (Schwab et al., Dev. Cell 8, 517-527, 2005). Convenient tools for design and generation of amiRNAs and their precursors are also available to the public (Schwab et al., Plant Cell 18, 1121-1133, 2006).

[0139] For optimal performance, the gene silencing techniques used for reducing expression in a plant of an endogenous gene requires the use of nucleic acid sequences from monocotyledonous plants for transformation of monocotyledonous plants, and from dicotyledonous plants for transformation of dicotyledonous plants. Preferably, a nucleic acid sequence from any given plant species is introduced into that same species. For example, a nucleic acid sequence from rice is transformed into a rice plant. However, it is not an absolute requirement that the nucleic acid sequence to be introduced originates from the same plant species as the plant in which it will be introduced. It is sufficient that there is substantial homology between the endogenous target gene and the nucleic acid to be introduced.

[0140] Described above are examples of various methods for the reduction or substantial elimination of expression in a plant of an endogenous gene. A person skilled in the art would readily be able to adapt the aforementioned methods for silencing so as to achieve reduction of expression of an endogenous gene in a whole plant or in parts thereof through the use of an appropriate promoter, for example.

[0141] Transformation

[0142] The term “introduction” or “transformation” as referred to herein encompasses the transfer of an exogenous polynucleotide into a host cell, irrespective of the method used for transfer. Plant tissue capable of subsequent clonal propagation, whether by organogenesis or embryogenesis, may be transformed with a genetic construct of the present invention and a whole plant regenerated there from. The particular tissue chosen will vary depending on the clonal propagation systems available for, and best suited to, the particular species being transformed. Exemplary tissue targets include leaf disks, pollen, embryos, cotyledons, hypocotyls, megagametophytes, callus tissue, existing meristematic tissue (e.g., apical meristem, axillary buds, and root meristems), and induced meristem tissue (e.g., cotyledon meristem and hypocotyl meristem). The polynucleotide may be transiently or stably introduced into a host cell and may be maintained non-integrated, for example, as a plasmid. Alternatively, it may be integrated into the host genome. The resulting transformed plant cell may then be used to regenerate a transformed plant in a manner known to persons skilled in the art. Alternatively, a plant cell that cannot be regenerated into a plant may be chosen as host cell, i.e. the resulting transformed plant cell does not have the capacity to regenerate into a (whole) plant.

[0143] The transfer of foreign genes into the genome of a plant is called transformation. Transformation of plant species is now a fairly routine technique. Advantageously, any of several transformation methods may be used to introduce the gene of interest into a suitable ancestor cell. The methods described for the transformation and regeneration of plants from plant tissues or plant cells may be utilized for transient or for stable transformation. Transformation methods include the use of liposomes, electroporation, chemicals that increase free DNA uptake, injection of the DNA directly into the plant, particle gun bombardment, transformation using viruses or pollen and microprojection. Methods may be selected from the calcium/polyethylene glycol method for protoplasts (Krens, F. A. et al., (1982) Nature 296, 72-74; Negrutiu I et al. (1987) Plant Mol Biol 8: 363-373); electroporation of protoplasts (Shillito R. D. et al. (1985) Bio/Technol 3, 1099-1102); microinjection into plant material (Crossway A et al., (1986) Mol. Gen Genet 202: 179-185); DNA or RNA-coated particle bombardment (Klein TM et al., (1987) Nature 327: 70) infection with (non-integrative) viruses and the like. Transgenic plants, including transgenic crop plants, are preferably produced via Agrobacterium-mediated transformation. An advantageous transformation method is the transformation in planta. To this end, it is possible, for example, to allow the agrobacteria to act on plant seeds or to inoculate the plant meristem with agrobacteria. It has proved particularly expedient in accordance with the invention to allow a suspension of transformed agrobacteria to act on the intact plant or at least on the flower primordia. The plant is subsequently grown on until the seeds of the treated plant are obtained (Clough and Bent, Plant J. (1998) 16, 735-743). Methods for Agrobacterium-mediated transformation of rice include well known methods for rice transformation, such as those described in any of the following: European patent application EP 1198985 A1, Aldemita and Hodges (Planta 199: 612-617, 1996); Chan et al. (Plant Mol Biol 22 (3): 491-506, 1993), Hiei et al. (Plant J 6 (2): 271-282, 1994), which disclosures are incorporated by reference herein as if fully set forth. In the case of corn transformation, the preferred method is as described in either Ishida et al. (Nat. Biotechnol 14(6): 745-50, 1996) or Frame et al. (Plant Physiol 129(1): 13-22, 2002), which disclosures are incorporated by reference herein as if fully set forth. Said methods are further described by way of example in B. Jenes et al., Techniques for Gene Transfer, in: Transgenic Plants, Vol. 1, Engineering and Utilization, eds. S. D. Kung and R. Wu, Academic Press (1993) 128-143 and in Potrykus Annu. Rev. Plant Physiol. Plant Molec. Biol. 42 (1991) 205-225). The nucleic acids or the construct to be expressed is preferably cloned into a vector, which is suitable for transforming Agrobacterium tumefaciens, for example pBin19 (Bevan et al., Nucl. Acids Res. 12 (1984) 8711). Agrobacteria transformed by such a vector can then be used in known manner for the transformation of plants, such as plants used as a model, like Arabidopsis (Arabidopsis thaliana is within the scope of the present invention not considered as a crop plant), or crop plants such as, by way of example, tobacco plants, for example by immersing bruised leaves or chopped leaves in an agrobacterial solution and then culturing them in suitable media. The transformation of plants by means of Agrobacterium tumefaciens is described, for example, by Höfgen and Willmitzer in Nucl. Acid Res. (1988) 16, 9877 or is known inter alia from F. F. White, Vectors for Gene Transfer in Higher Plants; in Transgenic Plants, Vol. 1, Engineering and Utilization, eds. S. D. Kung and R. Wu, Academic Press, 1993, pp. 15-38.

[0144] In addition to the transformation of somatic cells, which then have to be regenerated into intact plants, it is also possible to transform the cells of plant meristems and in particular those cells which develop into gametes. In this case, the transformed gametes follow the natural plant development, giving rise to transgenic plants. Thus, for example, seeds of Arabidopsis are treated with agrobacteria and seeds are obtained from the developing plants of which a certain proportion is transformed and thus transgenic [Feldman, Kans. and Marks Md. (1987). Mol Gen Genet 208:1-9; Feldmann K (1992). In: C Koncz, N-H Chua and J Shell, eds, Methods in Arabidopsis Research. Word Scientific, Singapore, pp. 274-289]. Alternative methods are based on the repeated removal of the inflorescences and incubation of the excision site in the center of the rosette with transformed agrobacteria, whereby transformed seeds can likewise be obtained at a later point in time (Chang (1994). Plant J. 5: 551-558; Katavic (1994). Mol Gen Genet, 245: 363-370). However, an especially effective method is the vacuum infiltration method with its modifications such as the “floral dip” method. In the case of vacuum infiltration of Arabidopsis, intact plants under reduced pressure are treated with an agrobacterial suspension [Bechthold, N (1993). C R Acad Sci Paris Life Sci, 316: 1194-1199], while in the case of the “floral dip” method the developing floral tissue is incubated briefly with a surfactant-treated agrobacterial suspension [Clough, S J and Bent A F (1998) The Plant J. 16, 735-743]. A certain proportion of transgenic seeds are harvested in both cases, and these seeds can be distinguished from non-transgenic seeds by growing under the above-described selective conditions. In addition the stable transformation of plastids is of advantages because plastids are inherited maternally is most crops reducing or eliminating the risk of transgene flow through pollen. The transformation of the chloroplast genome is generally achieved by a process which has been schematically displayed in Klaus et al., 2004 [Nature Biotechnology 22 (2), 225-229]. Briefly the sequences to be transformed are cloned together with a selectable marker gene between flanking sequences homologous to the chloroplast genome. These homologous flanking sequences direct site specific integration into the plastome. Plastidal transformation has been described for many different plant species and an overview is given in Bock (2001) Transgenic plastids in basic research and plant biotechnology. J Mol Biol. 2001 Sep. 21; 312(3):425-38 or Maliga, P (2003) Progress towards commercialization of plastid transformation technology. Trends Biotechnol. 21, 20-28. Further biotechnological progress has recently been reported in form of marker free plastid transformants, which can be produced by a transient co-integrated maker gene (Klaus et al., 2004, Nature Biotechnology 22(2), 225-229).

[0145] The genetically modified plant cells can be regenerated via all methods with which the skilled worker is familiar. Suitable methods can be found in the abovementioned publications by S. D. Kung and R. Wu, Potrykus or Hofgen and Willmitzer. Alternatively, the genetically modified plant cells are non-regenerable into a whole plant.

[0146] Generally after transformation, plant cells or cell groupings are selected for the presence of one or more markers which are encoded by plant-expressible genes co-transferred with the gene of interest, following which the transformed material is regenerated into a whole plant. To select transformed plants, the plant material obtained in the transformation is, as a rule, subjected to selective conditions so that transformed plants can be distinguished from untransformed plants. For example, the seeds obtained in the above-described manner can be planted and, after an initial growing period, subjected to a suitable selection by spraying. A further possibility consists in growing the seeds, if appropriate after sterilization, on agar plates using a suitable selection agent so that only the transformed seeds can grow into plants. Alternatively, the transformed plants are screened for the presence of a selectable marker such as the ones described above.

[0147] Following DNA transfer and regeneration, putatively transformed plants may also be evaluated, for instance using Southern analysis, for the presence of the gene of interest, copy number and/or genomic organisation. Alternatively or additionally, expression levels of the newly introduced DNA may be monitored using Northern and/or Western analysis, both techniques being well known to persons having ordinary skill in the art.

[0148] The generated transformed plants may be propagated by a variety of means, such as by clonal propagation or classical breeding techniques. For example, a first generation (or T1) transformed plant may be selfed and homozygous second-generation (or T2) transformants selected, and the T2 plants may then further be propagated through classical breeding techniques. The generated transformed organisms may take a variety of forms. For example, they may be chimeras of transformed cells and non-transformed cells; clonal transformants (e.g., all cells transformed to contain the expression cassette); grafts of transformed and untransformed tissues (e.g., in plants, a transformed rootstock grafted to an untransformed scion).

[0149] Throughout this application a plant, plant part, seed or plant cell transformed with—or interchangeably transformed by—a construct or transformed with or by a nucleic acid is to be understood as meaning a plant, plant part, seed or plant cell that carries said construct or said nucleic acid as a transgene due the result of an introduction of this construct or this nucleic acid by biotechnological means. The plant, plant part, seed or plant cell therefore comprises this recombinant construct or this recombinant nucleic acid.

[0150] Throughout this application a plant, plant part, seed or plant cell transformed with—or interchangeably transformed by—a construct or transformed with or by a nucleic acid is to be understood as meaning a plant, plant part, seed or plant cell that carries said construct or said nucleic acid as a transgene due the result of an introduction of this construct or this nucleic acid by biotechnological means. The plant, plant part, seed or plant cell therefore comprises this recombinant construct or this recombinant nucleic acid.

[0151] T-DNA Activation Tagging

[0152] “T-DNA activation” tagging (Hayashi et al. Science (1992) 1350-1353), involves insertion of T-DNA, usually containing a promoter (may also be a translation enhancer or an intron), in the genomic region of the gene of interest or 10 kb up- or downstream of the coding region of a gene in a configuration such that the promoter directs expression of the targeted gene. Typically, regulation of expression of the targeted gene by its natural promoter is disrupted and the gene falls under the control of the newly introduced promoter. The promoter is typically embedded in a T-DNA. This T-DNA is randomly inserted into the plant genome, for example, through Agrobacterium infection and leads to modified expression of genes near the inserted T-DNA. The resulting transgenic plants show dominant phenotypes due to modified expression of genes close to the introduced promoter.

[0153] Tilling

[0154] The term “TILLING” is an abbreviation of “Targeted Induced Local Lesions In Genomes” and refers to a mutagenesis technology useful to generate and/or identify nucleic acids encoding proteins with modified expression and/or activity. TILLING also allows selection of plants carrying such mutant variants. These mutant variants may exhibit modified expression, either in strength or in location or in timing (if the mutations affect the promoter for example). These mutant variants may exhibit higher activity than that exhibited by the gene in its natural form. TILLING combines high-density mutagenesis with high-throughput screening methods. The steps typically followed in TILLING are: (a) EMS mutagenesis (Redei GP and Koncz C (1992) In Methods in Arabidopsis Research, Koncz C, Chua N H, Schell J, eds. Singapore, World Scientific Publishing Co, pp. 16-82; Feldmann et al., (1994) In Meyerowitz E M, Somerville C R, eds, Arabidopsis. Cold Spring Harbor Laboratory Press, Cold Spring Harbor, N.Y., pp 137-172; Lightner J and Caspar T (1998) In J Martinez-Zapater, J Salinas, eds, Methods on Molecular Biology, Vol. 82. Humana Press, Totowa, N.J., pp 91-104); (b) DNA preparation and pooling of individuals; (c) PCR amplification of a region of interest; (d) denaturation and annealing to allow formation of heteroduplexes; (e) DHPLC, where the presence of a heteroduplex in a pool is detected as an extra peak in the chromatogram; (f) identification of the mutant individual; and (g) sequencing of the mutant PCR product. Methods for TILLING are well known in the art (McCallum et al., (2000) Nat Biotechnol 18: 455-457; reviewed by Stemple (2004) Nat Rev Genet 5(2): 145-50).

[0155] Homologous Recombination

[0156] “Homologous recombination” allows introduction in a genome of a selected nucleic acid at a defined selected position. Homologous recombination is a standard technology used routinely in biological sciences for lower organisms such as yeast or the moss Physcomitrella. Methods for performing homologous recombination in plants have been described not only for model plants (Offringa et al. (1990) EMBO J 9(10): 3077-84) but also for crop plants, for example rice (Terada et al. (2002) Nat Biotech 20(10): 1030-4; lida and Terada (2004) Curr Opin Biotech 15(2): 132-8), and approaches exist that are generally applicable regardless of the target organism (Miller et al, Nature Biotechnol. 25, 778-785, 2007).

[0157] Yield Related Trait(s)

[0158] A “Yield related trait” is a trait or feature which is related to plant yield. Yield-related traits may comprise one or more of the following non-limitative list of features: early flowering time, yield, biomass, seed yield, early vigour, greenness index, growth rate, agronomic traits, such as e.g. tolerance to submergence (which leads to yield in rice), Water Use Efficiency (WUE), Nitrogen Use Efficiency (NUE), etc.

[0159] Reference herein to “enhanced yield-related trait” is taken to mean an increase relative to control plants in a yield-related trait, for instance in early vigour and/or in biomass, of a whole plant or of one or more parts of a plant, which may include (i) aboveground parts, preferably aboveground harvestable parts, and/or (ii) parts below ground, preferably harvestable parts below ground.

[0160] In particular, such harvestable parts are roots such as taproots, stems, beets, tubers, leaves, flowers or seeds.

[0161] Yield

[0162] The term “yield” in general means a measurable produce of economic value, typically related to a specified crop, to an area, and to a period of time. Individual plant parts directly contribute to yield based on their number, size and/or weight, or the actual yield is the yield per square meter for a crop and year, which is determined by dividing total production (includes both harvested and appraised production) by planted square meters.

[0163] The terms “yield” of a plant and “plant yield” are used interchangeably herein and are meant to refer to vegetative biomass such as root and/or shoot biomass, to reproductive organs, and/or to propagules such as seeds of that plant.

[0164] Flowers in maize are unisexual; male inflorescences (tassels) originate from the apical stem and female inflorescences (ears) arise from axillary bud apices. The female inflorescence produces pairs of spikelets on the surface of a central axis (cob). Each of the female spikelets encloses two fertile florets, one of them will usually mature into a maize kernel once fertilized. Hence a yield increase in maize may be manifested as one or more of the following: increase in the number of plants established per square meter, an increase in the number of ears per plant, an increase in the number of rows, number of kernels per row, kernel weight, thousand kernel weight, ear length/diameter, increase in the seed filling rate, which is the number of filled florets (i.e. florets containing seed) divided by the total number of florets and multiplied by 100), among others.

[0165] Inflorescences in rice plants are named panicles. The panicle bears spikelets, which are the basic units of the panicles, and which consist of a pedicel and a floret. The floret is borne on the pedicel and includes a flower that is covered by two protective glumes: a larger glume (the lemma) and a shorter glume (the palea). Hence, taking rice as an example, a yield increase may manifest itself as an increase in one or more of the following: number of plants per square meter, number of panicles per plant, panicle length, number of spikelets per panicle, number of flowers (or florets) per panicle; an increase in the seed filling rate which is the number of filled florets (i.e. florets containing seeds) divided by the total number of florets and multiplied by 100; an increase in thousand kernel weight, among others.

[0166] Early Flowering Time

[0167] Plants having an “early flowering time” as used herein are plants which start to flower earlier than control plants. Hence this term refers to plants that show an earlier start of flowering.

[0168] Flowering time of plants can be assessed by counting the number of days (“time to flower”) between sowing and the emergence of a first inflorescence. The “flowering time” of a plant can for instance be determined using the method as described in WO 2007/093444.

[0169] Early Vigour

[0170] “Early vigour” refers to active healthy well-balanced growth especially during early stages of plant growth, and may result from increased plant fitness due to, for example, the plants being better adapted to their environment (i.e. optimizing the use of energy resources and partitioning between shoot and root). Plants having early vigour also show increased seedling survival and a better establishment of the crop, which often results in highly uniform fields (with the crop growing in uniform manner, i.e. with the majority of plants reaching the various stages of development at substantially the same time), and often better and higher yield. Therefore, early vigour may be determined by measuring various factors, such as thousand kernel weight, percentage germination, percentage emergence, seedling growth, seedling height, root length, root and shoot biomass and many more.

[0171] Increased Growth Rate

[0172] The increased growth rate may be specific to one or more parts of a plant (including seeds), or may be throughout substantially the whole plant. Plants having an increased growth rate may have a shorter life cycle. The life cycle of a plant may be taken to mean the time needed to grow from a mature seed up to the stage where the plant has produced mature seeds, similar to the starting material. This life cycle may be influenced by factors such as speed of germination, early vigour, growth rate, greenness index, flowering time and speed of seed maturation. The increase in growth rate may take place at one or more stages in the life cycle of a plant or during substantially the whole plant life cycle. Increased growth rate during the early stages in the life cycle of a plant may reflect enhanced vigour. The increase in growth rate may alter the harvest cycle of a plant allowing plants to be sown later and/or harvested sooner than would otherwise be possible (a similar effect may be obtained with earlier flowering time). If the growth rate is sufficiently increased, it may allow for the further sowing of seeds of the same plant species (for example sowing and harvesting of rice plants followed by sowing and harvesting of further rice plants all within one conventional growing period). Similarly, if the growth rate is sufficiently increased, it may allow for the further sowing of seeds of different plants species (for example the sowing and harvesting of corn plants followed by, for example, the sowing and optional harvesting of soybean, potato or any other suitable plant). Harvesting additional times from the same rootstock in the case of some crop plants may also be possible. Altering the harvest cycle of a plant may lead to an increase in annual biomass production per square meter (due to an increase in the number of times (say in a year) that any particular plant may be grown and harvested). An increase in growth rate may also allow for the cultivation of transgenic plants in a wider geographical area than their wild-type counterparts, since the territorial limitations for growing a crop are often determined by adverse environmental conditions either at the time of planting (early season) or at the time of harvesting (late season). Such adverse conditions may be avoided if the harvest cycle is shortened. The growth rate may be determined by deriving various parameters from growth curves, such parameters may be: T-Mid (the time taken for plants to reach 50% of their maximal size) and T-90 (time taken for plants to reach 90% of their maximal size), amongst others.

[0173] Stress Resistance

[0174] An increase in yield and/or growth rate occurs whether the plant is under non-stress conditions or whether the plant is exposed to various stresses compared to control plants. Plants typically respond to exposure to stress by growing more slowly. In conditions of severe stress, the plant may even stop growing altogether. Mild stress on the other hand is defined herein as being any stress to which a plant is exposed which does not result in the plant ceasing to grow altogether without the capacity to resume growth. Mild stress in the sense of the invention leads to a reduction in the growth of the stressed plants of less than 40%, 35%, 30% or 25%, more preferably less than 20% or 15% in comparison to the control plant under non-stress conditions. Due to advances in agricultural practices (irrigation, fertilization, pesticide treatments) severe stresses are not often encountered in cultivated crop plants. As a consequence, the compromised growth induced by mild stress is often an undesirable feature for agriculture. Abiotic stresses or environmental stresses may be due to drought or excess water, anaerobic stress, salt stress, nutrient or nitrogen deficiency, chemical toxicity, oxidative stress and hot, cold or freezing temperatures.

[0175] “Biotic stresses” are typically those stresses caused by pathogens, such as bacteria, viruses, fungi, plants, nematodes and insects, or other animals, which may result in negative effects on plant growth.

[0176] The “abiotic stress” may be an osmotic stress caused by a water stress, e.g. due to drought, salt stress, or freezing stress. Abiotic stress may also be an oxidative stress or a cold stress. “Freezing stress” is intended to refer to stress due to freezing temperatures, i.e. temperatures at which available water molecules freeze and turn into ice. “Cold stress”, also called “chilling stress”, is intended to refer to cold temperatures, e.g. temperatures below 10° , or preferably below 5° C., but at which water molecules do not freeze. As reported in Wang et al. (Planta (2003) 218: 1-14), abiotic stress leads to a series of morphological, physiological, biochemical and molecular changes that adversely affect plant growth and productivity. Drought, salinity, extreme temperatures and oxidative stress are known to be interconnected and may induce growth and cellular damage through similar mechanisms. Rabbani et al. (Plant Physiol (2003) 133: 1755-1767) describes a particularly high degree of “cross talk” between drought stress and high-salinity stress. For example, drought and/or salinisation are manifested primarily as osmotic stress, resulting in the disruption of homeostasis and ion distribution in the cell. Oxidative stress, which frequently accompanies high or low temperature, salinity or drought stress, may cause denaturing of functional and structural proteins. As a consequence, these diverse environmental stresses often activate similar cell signaling pathways and cellular responses, such as the production of stress proteins, up-regulation of anti-oxidants, accumulation of compatible solutes and growth arrest. The term “non-stress” conditions as used herein are those environmental conditions that allow optimal growth of plants. Persons skilled in the art are aware of normal soil conditions and climatic conditions for a given location. Plants with optimal growth conditions, (grown under non-stress conditions) typically yield in increasing order of preference at least 97%, 95%, 92%, 90%, 87%, 85%, 83%, 80%, 77% or 75% of the average production of such plant in a given environment. Average production may be calculated on harvest and/or season basis. Persons skilled in the art are aware of average yield productions of a crop.

[0177] In particular, the methods of the present invention may be performed under non-stress conditions. In an example, the methods of the present invention may be performed under non-stress conditions such as mild drought to give plants having increased yield relative to control plants.

[0178] In another embodiment, the methods of the present invention may be performed under stress conditions, preferably under abiotic stress conditions. In an example, the methods of the present invention may be performed under stress conditions such as drought to give plants having increased yield relative to control plants. In another example, the methods of the present invention may be performed under stress conditions such as nutrient deficiency to give plants having increased yield relative to control plants.

[0179] Nutrient deficiency may result from a lack of nutrients such as nitrogen, phosphates and other phosphorous-containing compounds, potassium, calcium, magnesium, manganese, iron and boron, amongst others.

[0180] In yet another example, the methods of the present invention may be performed under stress conditions such as salt stress to give plants having increased yield relative to control plants. The term salt stress is not restricted to common salt (NaCl), but may be any one or more of: NaCl, KCl, LiCl, MgCl₂, CaCl₂, amongst others.

[0181] In yet another example, the methods of the present invention may be performed under stress conditions such as cold stress or freezing stress to give plants having increased yield relative to control plants.

[0182] Increase/Improve/Enhance

[0183] The terms “increase”, “improve” or “enhance” in the context of a yield-related trait are interchangeable and shall mean in the sense of the application at least a 3%, 4%, 5%, 6%, 7%, 8%, 9% or 10%, preferably at least 15% or 20%, more preferably 25%, 30%, 35% or 40% increase in the yield-related trait (such as more yield and/or growth) in comparison to control plants as defined herein.

[0184] Seed Yield

[0185] Seeds can be obtained via sexual reproduction or via apomixis. Increased seed yield may manifest itself as one or more of the following:
[0186] a) an increase in seed biomass (total seed weight) which may be on an individual seed basis and/or per plant and/or per square meter;
[0187] b) increased number of flowers per plant;
[0188] c) increased number of seeds;
[0189] d) increased seed filling rate (which is expressed as the ratio between the number of filled florets divided by the total number of florets);
[0190] e) increased harvest index, which is expressed as a ratio of the yield of harvestable parts, such as seeds, divided by the biomass of aboveground plant parts; and
[0191] f) increased thousand kernel weight (TKW), which is extrapolated from the number of seeds counted and their total weight. An increased TKW may result from an increased seed size and/or seed weight, and may also result from an increase in embryo and/or endosperm size.

[0192] The terms “filled florets” and “filled seeds” may be considered synonyms.

[0193] An increase in seed yield may also be manifested as an increase in seed size and/or seed volume. Furthermore, an increase in seed yield may also manifest itself as an increase in seed area and/or seed length and/or seed width and/or seed perimeter.

[0194] Greenness Index

[0195] The “greenness index” as used herein is calculated from digital images of plants. For each pixel belonging to the plant object on the image, the ratio of the green value versus the red value (in the RGB model for encoding color) is calculated. The greenness index is expressed as the percentage of pixels for which the green-to-red ratio exceeds a given threshold. Under normal growth conditions, under salt stress growth conditions, and under reduced nutrient availability growth conditions, the greenness index of plants is measured in the last imaging before flowering. In contrast, under drought stress growth conditions, the greenness index of plants is measured in the first imaging after drought.

[0196] Biomass

[0197] The term “biomass” as used herein is intended to refer to the total weight of a plant or plant part (excluding seeds or fruits obtained from sexual reproduction or apomixis). Total weight can be measured as dry weight, fresh weight or wet weight. Within the definition of biomass, a distinction may be made between the biomass of one or more parts of a plant, which may include any one or more of the following:
[0198] aboveground parts such as but not limited to stem or shoot biomass, leaf biomass, etc.,
[0199] below-ground biomass, such as but not limited to root biomass, tubers, bulbs, rhizomes, stolons or creeping rootstalks etc.;

[0200] In a preferred embodiment throughout this application any reference to “root” as biomass or harvestable parts or as organ of increased sugar content is to be understood as a reference to harvestable parts partly inserted in or in physical contact with the ground such as but not limited to beets and other hypocotyl areas of a plant, rhizomes, stolons or creeping rootstalks, but not including leaves, as well as harvestable parts below-ground, such as but not limited to root, taproot, tubers or bulbs.

[0201] Marker Assisted Breeding

[0202] Such breeding programmes sometimes require introduction of allelic variation by mutagenic treatment of the plants, using for example EMS mutagenesis; alternatively, the programme may start with a collection of allelic variants of so called “natural” origin caused unintentionally. Identification of allelic variants then takes place, for example, by PCR. This is followed by a step for selection of superior allelic variants of the sequence in question and which give increased yield. Selection is typically carried out by monitoring growth performance of plants containing different allelic variants of the sequence in question. Growth performance may be monitored in a greenhouse or in the field. Further optional steps include crossing plants in which the superior allelic variant was identified with another plant. This could be used, for example, to make a combination of interesting phenotypic features.

[0203] Use as Probes in (Gene Mapping)

[0204] Use of nucleic acids encoding the protein of interest for genetically and physically mapping the genes requires only a nucleic acid sequence of at least 15 nucleotides in length. These nucleic acids may be used as restriction fragment length polymorphism (RFLP) markers. Southern blots (Sambrook J, Fritsch EF and Maniatis T (1989) Molecular Cloning, A Laboratory Manual) of restriction-digested plant genomic DNA may be probed with the nucleic acids encoding the protein of interest. The resulting banding patterns may then be subjected to genetic analyses using computer programs such as MapMaker (Lander et al. (1987) Genomics 1: 174-181) in order to construct a genetic map. In addition, the nucleic acids may be used to probe Southern blots containing restriction endonuclease-treated genomic DNAs of a set of individuals representing parent and progeny of a defined genetic cross. Segregation of the DNA polymorphisms is noted and used to calculate the position of the nucleic acid encoding the protein of interest in the genetic map previously obtained using this population (Botstein et al. (1980) Am. J. Hum. Genet. 32:314-331).

[0205] The production and use of plant gene-derived probes for use in genetic mapping is described in Bernatzky and Tanksley (1986) Plant Mol. Biol. Reporter 4: 37-41. Numerous publications describe genetic mapping of specific cDNA clones using the methodology outlined above or variations thereof. For example, F2 intercross populations, backcross populations, randomly mated populations, near isogenic lines, and other sets of individuals may be used for mapping. Such methodologies are well known to those skilled in the art.

[0206] The nucleic acid probes may also be used for physical mapping (i.e., placement of sequences on physical maps; see Hoheisel et al. In: Non-mammalian Genomic Analysis: A Practical Guide, Academic press 1996, pp. 319-346, and references cited therein). In another embodiment, the nucleic acid probes may be used in direct fluorescence in situ hybridisation (FISH) mapping (Trask (1991) Trends Genet. 7:149-154). Although current methods of FISH mapping favour use of large clones (several kb to several hundred kb; see Laan et al. (1995) Genome Res. 5:13-20), improvements in sensitivity may allow performance of FISH mapping using shorter probes.

[0207] A variety of nucleic acid amplification-based methods for genetic and physical mapping may be carried out using the nucleic acids. Examples include allele-specific amplification (Kazazian (1989) J. Lab. Clin. Med 11:95-96), polymorphism of PCR-amplified fragments (CAPS; Sheffield et al. (1993) Genomics 16:325-332), allele-specific ligation (Landegren et al. (1988) Science 241:1077-1080), nucleotide extension reactions (Sokolov (1990) Nucleic Acid Res. 18:3671), Radiation Hybrid Mapping (Walter et al. (1997) Nat. Genet. 7:22-28) and Happy Mapping (Dear and Cook (1989) Nucleic Acid Res. 17:6795-6807). For these methods, the sequence of a nucleic acid is used to design and produce primer pairs for use in the amplification reaction or in primer extension reactions. The design of such primers is well known to those skilled in the art. In methods employing PCR-based genetic mapping, it may be necessary to identify DNA sequence differences between the parents of the mapping cross in the region corresponding to the instant nucleic acid sequence. This, however, is generally not necessary for mapping methods.

[0208] Plant

[0209] The term “plant” as used herein encompasses whole plants, ancestors and progeny of the plants and plant parts, including seeds, shoots, stems, leaves, roots (including tubers), flowers, and tissues and organs, wherein each of the aforementioned comprise the gene/nucleic acid of interest. The term “plant” also encompasses plant cells, suspension cultures, callus tissue, embryos, meristematic regions, gametophytes, sporophytes, pollen and microspores, again wherein each of the aforementioned comprises the gene/nucleic acid of interest.

[0210] Plants that are particularly useful in the methods of the invention include all plants which belong to the superfamily Viridiplantae, in particular monocotyledonous and dicotyledonous plants including fodder or forage legumes, ornamental plants, food crops, trees or shrubs selected from the list comprising Acer spp., Actinidia spp., Abelmoschus spp., Agave sisalana, Agropyron spp., Agrostis stolonifera, Allium spp., Amaranthus spp., Ammophila arenaria, Ananas comosus, Annona spp., Apium graveolens, Arachis spp, Artocarpus spp., Asparagus officinalis, Avena spp. (e.g. Avena sativa, Avena fatua, Avena byzantina, Avena fatua . sativa, Avena hybrida), Averrhoa carambola, Bambusa sp., Benincasa hispida, Bertholletia excelsea, Beta vulgaris, Brassica spp. (e.g. Brassica napus, Brassica rapa ssp. [canola, oilseed rape, turnip rape]), Cadaba farinosa, Camellia sinensis, Canna indica, Cannabis sativa, Capsicum spp., Carex elata, Carica papaya, Carissa macrocarpa, Carya spp., Carthamus tinctorius, Castanea spp., Ceiba pentandra, Cichorium endivia, Cinnamomum spp., Citrullus lanatus, Citrus spp., Cocos spp., Coffea spp., Colocasia esculenta, Cola spp., Corchorus sp., Coriandrum sativum, Corylus spp., Crataegus spp., Crocus sativus, Cucurbita spp., Cucumis spp., Cynara spp., Daucus carota, Desmodium spp., Dimocarpus longan, Dioscorea spp., Diospyros spp., Echinochloa spp., Elaeis (e.g. Elaeis guineensis, Elaeis oleifera), Eleusine coracana, Eragrostis tef, Erianthus sp., Eriobotrya japonica, Eucalyptus sp., Eugenia uniflora, Fagopyrum spp., Fagus spp., Festuca arundinacea, Ficus carica, Fortunella spp., Fragaria spp., Ginkgo biloba, Glycine spp. (e.g. Glycine max, Soja hispida or Soja max), Gossypium hirsutum, Helianthus spp. (e.g. Helianthus annuus), Hemerocallis fulva, Hibiscus spp., Hordeum spp. (e.g. Hordeum vulgare), Ipomoea batatas, Juglans spp., Lactuca sativa, Lathyrus spp., Lens culinaris, Linum usitatissimum, Litchi chinensis, Lotus spp., Luffa acutangula, Lupinus spp., Luzula sylvatica, Lycopersicon spp. (e.g. Lycopersicon esculentum, Lycopersicon lycopersicum, Lycopersicon pyriforme), Macrotyloma spp., Malus spp., Malpighia emarginata, Mammea americana, Mangifera indica, Manihot spp., Manilkara zapota, Medicago sativa, Melilotus spp., Mentha spp., Miscanthus sinensis, Momordica spp., Morus nigra, Musa spp., Nicotiana spp., Olea spp., Opuntia spp., Ornithopus spp., Oryza spp. (e.g. Oryza sativa, Oryza latifolia), Panicum miliaceum, Panicum virgatum, Passiflora edulis, Pastinaca sativa, Pennisetum sp., Persea spp., Petroselinum crispum, Phalaris arundinacea, Phaseo/us spp., Phleum pratense, Phoenix spp., Phragmites australis, Physalis spp., Pinus spp., Pistacia vera, Pisum spp., Poa spp., Populus spp., Prosopis spp., Prunus spp., Psidium spp., Punica granatum, Pyrus communis, Quercus spp., Raphanus sativus, Rheum rhabarbarum, Ribes spp., Ricinus communis, Rubus spp., Saccharum spp., Salix sp., Sambucus spp., Secale cereale, Sesamum spp., Sinapis sp., Solanum spp. (e.g. Solanum tuberosum, Solanum integrifolium or Solanum lycopersicum), Sorghum bicolor, Spinacia spp., Syzygium spp., Tagetes spp., Tamarindus indica, Theobroma cacao, Trifolium spp., Tripsacum dactyloides, Triticosecale rimpaui, Triticum spp. (e.g. Triticum aestivum, Triticum durum, Triticum turgidum, Triticum hybernum, Triticum macha, Triticum sativum, Triticum monococcum or Triticum vulgare), Tropaeolum minus, Tropaeolum majus, Vaccinium spp., Vicia spp., Vigna spp., Viola odorata, Vitis spp., Zea mays, Zizania palustris, Ziziphus spp., amongst others.

[0211] Control Plant(s)

[0212] The choice of suitable control plants is a routine part of an experimental setup and may include corresponding wild type plants or corresponding plants without the gene of interest. The control plant is typically of the same plant species or even of the same variety as the plant to be assessed. The control plant may also be a nullizygote of the plant to be assessed. Nullizygotes (or null control plants) are individuals missing the transgene by segregation. Further, control plants are grown under equal growing conditions to the growing conditions of the plants of the invention, i.e. in the vicinity of, and simultaneously with, the plants of the invention. A “control plant” as used herein refers not only to whole plants, but also to plant parts, including seeds and seed parts.

[0213] Propagation Material/Propagule

[0214] “Propagation material” or “propagule” is any kind of organ, tissue, or cell of a plant capable of developing into a complete plant. “Propagation material” can be based on vegetative reproduction (also known as vegetative propagation, vegetative multiplication, or vegetative cloning) or sexual reproduction. Propagation material can therefore be seeds or parts of the non-reproductive organs, like stem or leave. In particular, with respect to poaceae, suitable propagation material can also be sections of the stem, i.e., stem cuttings (like setts).

[0215] Stalk

[0216] A “stalk” is the stem of a plant belonging the Poaceae, and is also known as the “millable cane”. In the context of poaceae “stalk”, “stem”, “shoot”, or “tiller” are used interchangeably.

### Sett

[0217] A “sett” is a section of the stem of a plant from the Poaceae, which is suitable to be used as propagation material. Synonymous expressions to “sett” are “seed-cane”, “stem cutting”, “section of the stalk”, and “seed piece”.

### DETAILED DESCRIPTION OF THE INVENTION

[0218] Concerning FKBP16-3

[0219] The present invention shows that modulating expression in a plant of a nucleic acid encoding a FKBP16-3 (FK506-binding protein) polypeptide gives plants having one or more enhanced yield-related traits relative to control plants.

[0220] According to a first embodiment, the present invention provides a method for enhancing one or more yield-related traits in plants relative to control plants, comprising modulating expression in a plant of a nucleic acid encoding a FKBP16-3 polypeptide and optionally selecting for plants having one or more enhanced yield-related traits. According to another embodiment, the present invention provides a method for producing plants having one or more enhanced yield-related traits relative to control plants, wherein said method comprises the steps of modulating expression in said plant of a nucleic acid encoding a FKBP16-3 polypeptide as described herein and optionally selecting for plants having one or more enhanced yield-related traits.

[0221] A preferred method for modulating (preferably, increasing) expression of a nucleic acid encoding a FKBP16-3 polypeptide is by introducing and expressing in a plant a nucleic acid encoding a FKBP16-3 polypeptide.

[0222] Any reference hereinafter to a “protein useful in the methods of the invention” is taken to mean a FKBP16-3 polypeptide as defined herein. Any reference hereinafter to a “nucleic acid useful in the methods of the invention” is taken to mean a nucleic acid capable of encoding such a FKBP16-3 polypeptide. In one embodiment any reference to a protein or nucleic acid “useful in the methods of the invention” is to be understood to mean proteins or nucleic acids “useful in the methods, constructs, plants, harvestable parts and products of the invention”. The nucleic acid to be introduced into a plant (and therefore useful in performing the methods of the invention) is any nucleic acid encoding the type of protein which will now be described, hereafter also named “FKBP16-3 nucleic acid” or “FKBP16-3 gene”.

[0223] A “FKBP16-3 polypeptide” as defined herein refers to any polypeptide preferably comprising a FKBP_C domain (Pfam PF00254), or a FKBP_PPIASE domain (ProfileScan PS50059), or a PEPTIDYL-PROLYL CIS-TRANS ISOMERASE domain (HMMPanther PTHR10516), or a Gene3D G3DSA:3.10.50.40 domain, or a HMMPanther PTHR10516:SF176 domain, or a superfamily SSF54534 FKBP-like domain, or a combination thereof. Further preferably, the FKBP16-3 polypeptide comprises an N-terminal chloroplast signal peptide and thylakoid target peptide.

[0224] Additionally or alternatively, the FKBP16-3 polypeptide comprises one or more of the following motifs:

Motif 1 (SEQ ID NO: 301):
CEKELENVPMVTTESGLQYKDIKVG[QS]GPSPP[VI]G[FY]QV
AANYVAMVP[SN]GQ[IV]F
Motif 2 (SEQ ID NO: 302):
DSSLEKGQPYIFRVG[SA]GQVIKGLDEG[IL]LSMKVGG[KL]R
RLY[IV]P
Motif 3 (SEQ ID NO: 303):
APGRPRVAP[NS]SPV[VI]FDVSL[EL]Y
Motif 4 (SEQ ID NO: 304):
DSSLEKGQPYIFRVG[SA]GQVIKGLDEGILSMKVGG[KL]RRLY
[IV]P
Motif 5 (SEQ ID NO: 305):
N[VLA]PMVT[TM]ESGLQYKDI[KR]VG[EQR]GPSPP[IV]GF
QVAA[NE][CY][IV]A[MI]VP[NT]GQIFDSSLEK
Motif 6 (SEQ ID NO: 306):
G[QR]PYIFRVG[AS]GQVIKGLDEGIL[ST]MKVGGLRRLYIPG
[PQ][LV][AS][FS][PL]
Motif 7 (SEQ ID NO: 307):
[LQAG][AV][ALGF][LFQ][DA]A[VLFI]A[AG]GLPPEEKP
KLCDA[AD]CE[AKTG][ED]LE

[0225] Motifs 1 to 7 were derived using the MEME algorithm (Bailey and Elkan, Proceedings of the Second International Conference on Intelligent Systems for Molecular Biology, pp. 28-36, AAAI Press, Menlo Park, Calif., 1994). At each position within a MEME motif, the residues are shown that are present in the query set of sequences with a frequency higher than 0.2. Residues within square brackets represent alternatives.

[0226] Preferably, the FKBP16-3 polypeptide comprises motif 1 and/or motif 2 and/or motif 3; further preferably the FKBP16-3 polypeptide comprises motif 1 and/or motif 4 and/or motif 3; most preferably the FKBP16-3 polypeptide comprises motif 5 and/or motif 6 and/or motif 7. In a particular embodiment, the FKBP16-3 polypeptide comprises motif 5 and motif 6, or motif 5 and motif 7, or motif 6 and 7, or all three motifs 5 to 7.

[0227] Additionally or alternatively, the FKBP16-3 protein has in increasing order of preference at least 25%, 26%, 27%, 28%, 29%, 30%, 31%, 32%, 33%, 34%, 35%, 36%, 37%, 38%, 39%, 40%, 41%, 42%, 43%, 44%, 45%, 46%, 47%, 48%, 49%, 50%, 51%, 52%, 53%, 54%, 55%, 56%, 57%, 58%, 59%, 60%, 61%, 62%, 63%, 64%, 65%, 66%, 67%, 68%, 69%, 70%, 71%, 72%, 73%, 74%, 75%, 76%, 77%, 78%, 79%, 80%, 81%, 82%, 83%, 84%, 85%, 86%, 87%, 88%, 89%, 90%, 91%, 92%, 93%, 94%, 95%, 96%, 97%, 98%, or 99% overall sequence identity to the amino acid sequence represented by SEQ ID NO: 2, provided that the homologous protein comprises any one or more of the conserved motifs as outlined above. The overall sequence identity is determined using a global alignment algorithm, such as the Needleman Wunsch algorithm in the program GAP (GCG Wisconsin Package, Accelrys), preferably with default parameters and preferably with sequences of mature proteins (i.e. without taking into account secretion signals or transit peptides). Alternatively the sequence identity is determined by comparison of a nucleic acid sequence to the sequence encoding the mature protein in SEQ ID NO: 1.

[0228] In another embodiment, the sequence identity level is determined by comparison of one or more conserved domains or motifs in SEQ ID NO: 2 with corresponding conserved domains or motifs in other FKBP16-3 polypeptides. Compared to overall sequence identity, the sequence identity will generally be higher when only conserved domains or motifs are considered. Preferably the motifs in a FKBP16-3 polypeptide have, in increasing order of preference, at least 70%, 71%, 72%, 73%, 74%, 75%, 76%, 77%, 78%, 79%, 80%, 81%, 82%, 83%, 84%, 85%, 86%, 87%, 88%, 89%, 90%, 91%, 92%, 93%, 94%, 95%, 96%, 97%, 98%, or 99% sequence identity to any one or more of the motifs represented by SEQ ID NO: 301 to SEQ ID NO: 307 (Motifs 1 to 7). In other words, in another embodiment a method for enhancing one or more yield-related traits in plants is provided wherein said FKBP16-3 polypeptide comprises a conserved domain (or motif) with at least 70%, 71%, 72%, 73%, 74%, 75%, 76%, 77%, 78%, 79%, 80%, 81%, 82%, 83%, 84%, 85%, 86%, 87%, 88%, 89%, 90%, 91%, 92%, 93%, 94%, 95%, 96%, 97%, 98%, or 99% sequence identity to the conserved region starting with amino acid A116 up to amino acid F239 in SEQ ID NO: 2.

[0229] The terms “domain”, “signature” and “motif” are defined in the “definitions” section herein.

[0230] Preferably, the polypeptide sequence which when used in the construction of a phylogenetic tree such as the one depicted in FIG. 3 of Wang et al. (2012b), clusters with the OsFKBP16-3 or ZmFKBP8 polypeptides, or such as the tree depicted in FIG. 4 of Wang et al. (2012), clusters with the AtFKBP16-3 or PtFKBP26-1 or PtFKBP26-2 polypeptides.

[0231] Furthermore, FKBP16-3 polypeptides (at least in their native form) may have peptidyl-prolyl cis/trans isomerase activity. Tools and techniques for measuring peptidyl-prolyl cis/trans isomerase activity are well known in the art (see for example Gollan et al., 2011).

[0232] Alternatively, FKBP16-3 polypeptides may interact with potential photosystem assembly regulators, which can be detected in a yeast two-hybrid screen (as described in Gollan et al., 2011).

[0233] In addition, nucleic acids encoding FKBP16-3 polypeptides, when expressed in rice according to the methods of the present invention as outlined in Examples 7 and 9, give plants having increased yield related traits, in particular increased aboveground biomass. Another function of the nucleic acid sequences encoding FKBP16-3 polypeptides is to confer information for synthesis of the FKBP16-3 protein that increases yield or yield related traits as described herein, when such a nucleic acid sequence of the invention is transcribed and translated in a living plant cell.

[0234] In one embodiment the nucleic acid sequence employed in the methods, constructs, plants, harvestable parts and products of the invention is a nucleic acid molecule selected from the group consisting of:
[0235] (i) a nucleic acid represented by SEQ ID NO: 1;
[0236] (ii) the complement of a nucleic acid represented by SEQ ID NO: 1;
[0237] (iii) a nucleic acid encoding a FKBP16-3 polypeptide having in increasing order of preference at least 50%, 51%, 52%, 53%, 54%, 55%, 56%, 57%, 58%, 59%, 60%, 61%, 62%, 63%, 64%, 65%, 66%, 67%, 68%, 69%, 70%, 71%, 72%, 73%, 74%, 75%, 76%, 77%, 78%, 79%, 80%, 81%, 82%, 83%, 84%, 85%, 86%, 87%, 88%, 89%, 90%, 91%, 92%, 93%, 94%, 95%, 96%, 97%, 98%, or 99% sequence identity to the amino acid sequence represented by SEQ ID NO: 2, and additionally or alternatively comprising one or more motifs having in increasing order of preference at least 50%, 55%, 60%, 65%, 70%, 75%, 80%, 85%, 90%, 95%, 96%, 97%, 98%, 99% or more sequence identity to any one or more of the motifs given in SEQ ID NO: 301 to SEQ ID NO: 307, and further preferably conferring one or more enhanced yield-related traits relative to control plants;
[0238] (iv) a nucleic acid encoding a FKBP16-3 polypeptide having in increasing order of preference at least 50%, 51%, 52%, 53%, 54%, 55%, 56%, 57%, 58%, 59%, 60%, 61%, 62%, 63%, 64%, 65%, 66%, 67%, 68%, 69%, 70%, 71%, 72%, 73%, 74%, 75%, 76%, 77%, 78%, 79%, 80%, 81%, 82%, 83%, 84%, 85%, 86%, 87%, 88%, 89%, 90%, 91%, 92%, 93%, 94%, 95%, 96%, 97%, 98%, or 99% sequence identity to the conserved region starting with amino acid A116 up to amino acid F239 in SEQ ID NO:2; and
[0239] (v) a nucleic acid molecule which hybridizes with a nucleic acid molecule of (i) to (iv) under high stringency hybridization conditions and preferably confers one or more enhanced yield-related traits relative to control plants; or encodes a polypeptide selected from the group consisting of:
[0240] (i) an amino acid sequence represented by SEQ ID NO: 2;
[0241] (ii) an amino acid sequence having, in increasing order of preference, at least 50%, 51%, 52%, 53%, 54%, 55%, 56%, 57%, 58%, 59%, 60%, 61%, 62%, 63%, 64%, 65%, 66%, 82%, 83%, 84%, 85%, 86%, 87%, 88%, 89%, 90%, 91%, 92%, 93%, 94%, 95%, 96%, 97%, 98%, or 99% sequence identity to the amino acid sequence represented by SEQ ID NO: 2, and additionally or alternatively comprising one or more motifs having in increasing order of preference at least 50%, 55%, 60%, 65%, 70%, 75%, 80%, 85%, 90%, 95%, 96%, 97%, 98%, 99% or more sequence identity to any one or more of the motifs given in SEQ ID NO: 301 to SEQ ID NO: 307, and further preferably conferring one or more enhanced yield-related traits relative to control plants;
[0242] (iii) a FKBP16-3 polypeptide having in increasing order of preference at least 50%, 51%, 52%, 53%, 54%, 55%, 56%, 57%, 58%, 59%, 60%, 61%, 62%, 63%, 64%, 65%, 66%, 67%, 68%, 69%, 70%, 71%, 72%, 73%, 74%, 75%, 76%, 77%, 78%, 79%, 80%, 81%, 82%, 83%, 84%, 85%, 86%, 87%, 88%, 89%, 90%, 91%, 92%, 93%, 94%, 95%, 96%, 97%, 98%, or 99% sequence identity to the conserved region starting with amino acid A116 up to amino acid F239 in SEQ ID NO: 2; and
[0243] (iv) derivatives of any of the amino acid sequences given in (i) to (iii) above.

[0244] According one embodiment, there is provided a method for improving yield-related traits as provided herein in plants relative to control plants, comprising modulating expression in a plant of a nucleic acid encoding a FKBP16-3 polypeptide as defined herein.

[0245] The present invention is illustrated by transforming plants with the nucleic acid sequence represented by SEQ ID NO: 1, encoding the polypeptide sequence of SEQ ID NO: 2. However, performance of the invention is not restricted to these sequences; the methods of the invention may advantageously be performed using any FKBP16-3-encoding nucleic acid or FKBP16-3 polypeptide as defined herein. The term “FKBP16-3” or “FKBP16-3 polypeptide” as used herein also intends to include homologues as defined hereunder of SEQ ID NO: 2.

[0246] Examples of nucleic acids encoding FKBP16-3 polypeptides are given in Table A1 of the Examples section herein. Such nucleic acids are useful in performing the methods of the invention. The amino acid sequences given in Table A1 of the Examples section are example sequences of orthologues and paralogues of the FKBP16-3 polypeptide represented by SEQ ID NO: 2, the terms “orthologues” and “paralogues” being as defined herein. Further orthologues and paralogues may readily be identified by performing a so-called reciprocal blast search as described in the definitions section; where the query sequence is SEQ ID NO: 1 or SEQ ID NO: 2, the second BLAST (back-BLAST) would be against Triticum aestivum sequences.

[0247] The invention also provides hitherto unknown FKBP16-3-encoding nucleic acids and FKBP16-3 polypeptides useful for conferring one or more enhanced yield-related traits in plants relative to control plants.

[0248] According to a further embodiment of the present invention, there is therefore provided an isolated nucleic acid molecule selected from the group consisting of:
[0249] (i) a nucleic acid represented by SEQ ID NO: 1;
[0250] (ii) the complement of a nucleic acid represented by SEQ ID NO: 1;
[0251] (iii) a nucleic acid encoding a FKBP16-3 polypeptide having in increasing order of preference at least 50%, 51%, 52%, 53%, 54%, 55%, 56%, 57%, 58%, 59%, 60%, 61%, 62%, 63%, 64%, 65%, 66%, 67%, 68%, 69%, 70%, 71%, 72%, 73%, 74%, 75%, 76%, 77%, 78%, 79%, 80%, 81%, 82%, 83%, 84%, 85%, 86%, 87%, 88%, 89%, 90%, 91%, 92%, 93%, 94%, 95%, 96%, 97%, 98%, or 99% sequence identity to the amino acid sequence represented by SEQ ID NO: 2 and additionally or alternatively comprising one or more motifs having in increasing order of preference at least 50%, 55%, 60%, 65%, 70%, 75%, 80%, 85%, 90%, 95%, 96%, 97%, 98%, 99% or more sequence identity to any one or more of the motifs given in SEQ ID NO: 301 to SEQ ID NO: 307, and further preferably conferring one or more enhanced yield-related traits relative to control plants; and
[0252] (iv) a nucleic acid molecule which hybridizes with a nucleic acid molecule of (i) to (iii) under high stringency hybridization conditions and preferably confers one or more enhanced yield-related traits relative to control plants.

[0253] According to a further embodiment of the present invention, there is also provided an isolated polypeptide selected from the group consisting of:
[0254] (i) an amino acid sequence represented by SEQ ID NO: 2;
[0255] (ii) an amino acid sequence having, in increasing order of preference, at least 50%, 51%, 52%, 53%, 54%, 55%, 56%, 57%, 58%, 59%, 60%, 61%, 62%, 63%, 64%, 65%, 66%, 67%, 68%, 69%, 70%, 71%, 72%, 73%, 74%, 75%, 76%, 77%, 78%, 79%, 80%, 81%, 82%, 83%, 84%, 85%, 86%, 87%, 88%, 89%, 90%, 91%, 92%, 93%, 94%, 95%, 96%, 97%, 98%, or 99% sequence identity to the amino acid sequence represented by SEQ ID NO: 2, and additionally or alternatively comprising one or more motifs having in increasing order of preference at least 50%, 55%, 60%, 65%, 70%, 75%, 80%, 85%, 90%, 95%, 96%, 97%, 98%, 99% or more sequence identity to any one or more of the motifs given in SEQ ID NO: 301 to SEQ ID NO: 307, and further preferably conferring one or more enhanced yield-related traits relative to control plants; and
[0256] (iii) derivatives of any of the amino acid sequences given in (i) or (ii) above.

[0257] Nucleic acid variants may also be useful in practising the methods of the invention. Examples of such variants include nucleic acids encoding homologues and derivatives of any one of the amino acid sequences given in Table A1 of the Examples section, the terms “homologue” and “derivative” being as defined herein. Also useful in the methods, constructs, plants, harvestable parts and products of the invention are nucleic acids encoding homologues and derivatives of orthologues or paralogues of any one of the amino acid sequences given in Table A1 of the Examples section. Homologues and derivatives useful in the methods of the present invention have substantially the same biological and functional activity as the unmodified protein from which they are derived. Further variants useful in practising the methods of the invention are variants in which codon usage is optimised or in which miRNA target sites are removed.

[0258] Further nucleic acid variants useful in practising the methods of the invention include portions of nucleic acids encoding FKBP16-3 polypeptides, nucleic acids hybridising to nucleic acids encoding FKBP16-3 polypeptides, splice variants of nucleic acids encoding FKBP16-3 polypeptides, allelic variants of nucleic acids encoding FKBP16-3 polypeptides and variants of nucleic acids encoding FKBP16-3 polypeptides obtained by gene shuffling. The terms hybridising sequence, splice variant, allelic variant and gene shuffling are as described herein.

[0259] Nucleic acids encoding FKBP16-3 polypeptides need not be full-length nucleic acids, since performance of the methods of the invention does not rely on the use of full-length nucleic acid sequences. According to the present invention, there is provided a method for enhancing one or more yield-related traits in plants, comprising introducing, preferably by recombinant methods, and expressing in a plant a portion of any one of the nucleic acid sequences given in Table A1 of the Examples section, or a portion of a nucleic acid encoding an orthologue, paralogue or homologue of any of the amino acid sequences given in Table A1 of the Examples section.

[0260] A portion of a nucleic acid may be prepared, for example, by making one or more deletions to the nucleic acid. The portions may be used in isolated form or they may be fused to other coding (or non-coding) sequences in order to, for example, produce a protein that combines several activities. When fused to other coding sequences, the resultant polypeptide produced upon translation may be bigger than that predicted for the protein portion.

[0261] Portions useful in the methods, constructs, plants, harvestable parts and products of the invention, encode a FKBP16-3 polypeptide as defined herein or at least part thereof, and have substantially the same biological activity as the amino acid sequences given in Table A1 of the Examples section. Preferably, the portion is a portion of any one of the nucleic acids given in Table A1 of the Examples section, or is a portion of a nucleic acid encoding an orthologue or paralogue of any one of the amino acid sequences given in Table A1 of the Examples section. Preferably the portion is at least 400, 450, 500, 550, 600, 650, 700, 750, 800, 850, 900, 950, 1000 consecutive nucleotides in length, the consecutive nucleotides being of any one of the nucleic acid sequences given in Table A1 of the Examples section, or of a nucleic acid encoding an orthologue or paralogue of any one of the amino acid sequences given in Table A1 of the Examples section. Most preferably the portion is a portion of the nucleic acid of SEQ ID NO: 1. Preferably, the portion encodes a fragment of an amino acid sequence which comprises one or more of motifs 1 to 7, and/or has at least 50% sequence identity to SEQ ID NO: 2.

[0262] Another nucleic acid variant useful in the methods, constructs, plants, harvestable parts and products of the invention is a nucleic acid capable of hybridising, under reduced stringency conditions, preferably under stringent conditions, with a nucleic acid encoding a FKBP16-3 polypeptide as defined herein, or with a portion as defined herein. According to the present invention, there is provided a method for enhancing one or more yield-related traits in plants, comprising introducing, preferably by recombinant methods, and expressing in a plant a nucleic acid capable of hybridizing to the complement of a nucleic acid encoding any one of the proteins given in Table A1 of the Examples section, or to the complement of a nucleic acid encoding an orthologue, paralogue or homologue of any one of the proteins given in Table A1.

[0263] Hybridising sequences useful in the methods, constructs, plants, harvestable parts and products of the invention encode a FKBP16-3 polypeptide as defined herein, having substantially the same biological activity as the amino acid sequences given in Table A1 of the Examples section. Preferably, the hybridising sequence is capable of hybridising to the complement of a nucleic acid encoding any one of the proteins given in Table A1 of the Examples section, or to a portion of any of these sequences, a portion being as defined herein, or the hybridising sequence is capable of hybridising to the complement of a nucleic acid encoding an orthologue or paralogue of any one of the amino acid sequences given in Table A1 of the Examples section. Most preferably, the hybridising sequence is capable of hybridising to the complement of a nucleic acid encoding the polypeptide as represented by SEQ ID NO: 2 or to a portion thereof. In one embodiment, the hybridization conditions are of medium stringency, preferably of high stringency, as defined herein.

[0264] Preferably, the hybridising sequence encodes a polypeptide with an amino acid sequence which comprises one or more of motifs 1 to 7, and/or has at least 50% sequence identity to SEQ ID NO: 2.

[0265] In another embodiment, there is provided a method for enhancing one or more yield-related traits in plants, comprising introducing, preferably by recombinant methods, and expressing in a plant a splice variant of a nucleic acid encoding any one of the proteins given in Table A1 of the Examples section, or a splice variant of a nucleic acid encoding an orthologue, paralogue or homologue of any of the amino acid sequences given in Table A1 of the Examples section.

[0266] Preferred splice variants are splice variants of a nucleic acid represented by SEQ ID NO: 1, or a splice variant of a nucleic acid encoding an orthologue or paralogue of SEQ ID NO: 2. Preferably, the amino acid sequence encoded by the splice variant comprises one or more of motifs 1 to 7, and/or has at least 50% sequence identity to SEQ ID NO: 2.

[0267] In yet another embodiment, there is provided a method for enhancing one or more yield-related traits in plants, comprising introducing, preferably by recombinant methods, and expressing in a plant an allelic variant of a nucleic acid encoding any one of the proteins given in Table A1 of the Examples section, or comprising introducing, preferably by recombinant methods, and expressing in a plant an allelic variant of a nucleic acid encoding an orthologue, paralogue or homologue of any of the amino acid sequences given in Table A1 of the Examples section.

[0268] The polypeptides encoded by allelic variants useful in the methods of the present invention have substantially the same biological activity as the FKBP16-3 polypeptide of SEQ ID NO: 2 and any of the amino acid sequences depicted in Table A1 of the Examples section. Allelic variants exist in nature, and encompassed within the methods of the present invention is the use of these natural alleles. Preferably, the allelic variant is an allelic variant of SEQ ID NO: 1 or an allelic variant of a nucleic acid encoding an orthologue or paralogue of SEQ ID NO: 2. Preferably, the amino acid sequence encoded by the allelic variant comprises one or more of motifs 1 to 7, and/or has at least 50% sequence identity to SEQ ID NO: 2.

[0269] In yet another embodiment, there is provided a method for enhancing one or more yield-related traits in plants, comprising introducing, preferably by recombinant methods, and expressing in a plant a variant of a nucleic acid encoding any one of the proteins given in Table A1 of the Examples section, or comprising introducing, preferably by recombinant methods, and expressing in a plant a variant of a nucleic acid encoding an orthologue, paralogue or homologue of any of the amino acid sequences given in Table A1 of the Examples section, which variant nucleic acid is obtained by gene shuffling.

[0270] Preferably, the amino acid sequence encoded by the variant nucleic acid obtained by gene shuffling comprises one or more of motifs 1 to 7, and/or has at least 50% sequence identity to SEQ ID NO: 2.

[0271] Furthermore, nucleic acid variants may also be obtained by site-directed mutagenesis. Several methods are available to achieve site-directed mutagenesis, the most common being PCR based methods (Current Protocols in Molecular Biology. Wiley Eds.). FKBP16-3 polypeptides differing from the sequence of SEQ ID NO: 2 by one or several amino acids (substitution(s), insertion(s) and/or deletion(s) as defined herein) may equally be useful to increase the yield of plants in the methods and constructs and plants of the invention.

[0272] Nucleic acids encoding FKBP16-3 polypeptides may be derived from any natural or artificial source. The nucleic acid may be modified from its native form in composition and/or genomic environment through deliberate human manipulation. Preferably the nucleic acid sequences used in the methods of the present invention comprise codons optimised for expression in plants.

[0273] Preferably the FKBP16-3 polypeptide-encoding nucleic acid is from a plant, further preferably from a monocotyledonous plant, more preferably from the family Poaceae, most preferably the nucleic acid is from Triticum aestivum.

[0274] In another embodiment the present invention extends to recombinant chromosomal DNA comprising a nucleic acid sequence useful in the methods of the invention, wherein said nucleic acid is present in the chromosomal DNA as a result of recombinant methods, but is not in its natural genetic environment. In a further embodiment the recombinant chromosomal DNA of the invention is comprised in a plant cell.

[0275] Performance of the methods of the invention gives plants having one or more enhanced yield-related traits. In particular performance of the methods of the invention gives plants having increased yield, especially increased biomass (in particular aboveground biomass or green biomass) relative to control plants. The terms “biomass” is described in more detail in the Definitions section herein.

[0276] The present invention thus provides a method for increasing yield, especially aboveground biomass of plants, relative to control plants, which method comprises modulating expression in a plant of a nucleic acid encoding a FKBP16-3 polypeptide as defined herein.

[0277] According to a preferred feature of the present invention, performance of the methods of the invention gives plants having an increased growth rate relative to control plants. Therefore, according to the present invention, there is provided a method for increasing the growth rate of plants, which method comprises modulating expression in a plant of a nucleic acid encoding a FKBP16-3 polypeptide as defined herein.

[0278] Performance of the methods of the invention results in plants having increased seed yield relative to the seed yield of control plants, and/or increased aboveground biomass, in particular stem biomass relative to the aboveground biomass, and in particular stem biomass of control plants, and/or increased root biomass relative to the root biomass of control plants and/or increased beet biomass relative to the beet biomass of control plants. Moreover, it is particularly contemplated that the sugar content (in particular the sucrose content) in the above ground parts, particularly stem (in particular of sugar cane plants) and/or in the below-ground parts, in particular in roots including taproots and tubers, and/or in beets (in particular in sugar beets) is increased relative to the sugar content (in particular the sucrose content) in corresponding part(s) of the control plant

[0279] Performance of the methods of the invention gives plants grown under non-stress conditions or under mild drought conditions increased yield-related traits relative to control plants grown under comparable conditions. Therefore, according to the present invention, there is provided a method for increasing yield-related traits in plants grown under non-stress conditions or under mild drought conditions, which method comprises modulating expression in a plant of a nucleic acid encoding a FKBP16-3 polypeptide.

[0280] Performance of the methods of the invention gives plants grown under conditions of drought, increased yield-related traits relative to control plants grown under comparable conditions. Therefore, according to the present invention, there is provided a method for increasing yield-related traits in plants grown under conditions of drought which method comprises modulating expression in a plant of a nucleic acid encoding a FKBP16-3 polypeptide.

[0281] Performance of the methods of the invention gives plants grown under conditions of nutrient deficiency, particularly under conditions of nitrogen deficiency, increased yield-related traits relative to control plants grown under comparable conditions. Therefore, according to the present invention, there is provided a method for increasing yield-related traits in plants grown under conditions of nutrient deficiency, which method comprises modulating expression in a plant of a nucleic acid encoding a FKBP16-3 polypeptide. In a particular embodiment, the invention provides a method for increasing yield-related traits in plants grown under conditions of nitrogen deficiency, which method comprises modulating expression in a plant of a nucleic acid encoding a FKBP16-3 polypeptide.

[0282] Performance of the methods of the invention gives plants grown under conditions of salt stress, increased yield-related traits relative to control plants grown under comparable conditions. Therefore, according to the present invention, there is provided a method for increasing yield-related traits in plants grown under conditions of salt stress, which method comprises modulating expression in a plant of a nucleic acid encoding a FKBP16-3 polypeptide.

[0283] The invention also provides genetic constructs and vectors to facilitate introduction and/or expression in plants of nucleic acids encoding FKBP16-3 polypeptides. The gene constructs may be inserted into vectors, which may be commercially available, suitable for transforming into plants or host cells and suitable for expression of the gene of interest in the transformed cells. The invention also provides use of a gene construct as defined herein in the methods of the invention.

[0284] More specifically, the present invention provides a construct comprising:
[0285] (a) an isolated nucleic acid encoding a FKBP16-3 polypeptide as defined above;
[0286] (b) one or more control sequences capable of driving expression of the nucleic acid sequence of (a); and optionally
[0287] (c) a transcription termination sequence.

[0288] Preferably, the nucleic acid encoding a FKBP16-3 polypeptide is as defined above. In one embodiment the isolated FKBP16-3 polypeptide encoding nucleic acid comprised in the construct is selected from
[0289] (i) a nucleic acid represented by SEQ ID NO: 1;
[0290] (ii) the complement of a nucleic acid represented by SEQ ID NO: 1;
[0291] (iii) a nucleic acid encoding a FKBP16-3 polypeptide having at least 95% sequence identity to the amino acid sequence represented by SEQ ID NO: 2 and additionally or alternatively comprising one or more motifs having at least 95% sequence identity to any one or more of the motifs given in SEQ ID NO: 301 to SEQ ID NO: 307, and further preferably conferring one or more enhanced yield-related traits relative to control plants; and
[0292] (iv) a nucleic acid molecule which hybridizes with a nucleic acid molecule of (i) to (iii) under high stringency hybridization conditions and preferably confers one or more enhanced yield-related traits relative to control plants.

[0293] The term “control sequence” and “termination sequence” are as defined herein.

[0294] In particular the genetic construct of the invention is a plant expression construct, i.e. a genetic construct that allows for the expression of the nucleic acid encoding a FKBP16-3 polypeptide in a plant, plant cell or plant tissue after the construct has been introduced into this plant, plant cell or plant tissue, preferably by recombinant means. The plant expression construct may for example comprise said nucleic acid encoding a FKBP16-3 polypeptide in functional linkage to a promoter and optionally other control sequences controlling the expression of said nucleic acid in one or more plant cells, wherein the promoter and optional the other control sequences are not natively found in functional linkage to the FKBP16-3 nucleic acid. In a preferred embodiment the control sequence(s) including the promoter result in overexpression of the FKBP16-3 nucleic acid when the construct of the invention has been introduced into a plant, plant cell or plant tissue.

[0295] The genetic construct of the invention may be comprised in a host cell-for example a plant cell-seed, agricultural product or plant. Plants or host cells are transformed with a genetic construct such as a vector or an expression cassette comprising any of the nucleic acids described above. Thus the invention furthermore provides plants or host cells transformed with a construct as described above. In particular, the invention provides plants transformed with a construct as described above, which plants have increased yield-related traits as described herein.

[0296] In one embodiment the genetic construct of the invention confers increased yield or yield related traits(s) to a plant when it has been introduced into said plant, which plant expresses the nucleic acid encoding the FKBP16-3 polypeptide comprised in the genetic construct and preferably resulting in increased abundance of the FKBP16-3 polypeptide. In another embodiment the genetic construct of the invention confers increased yield or yield related traits(s) to a plant comprising plant cells in which the construct has been introduced, which plant cells express the FKBP16-3 nucleic acid comprised in the genetic construct. The promoter in such a genetic construct may be a promoter not native to the nucleic acid described above, i.e. a promoter different from the promoter regulating the expression of the FKBP16-3 nucleic acid in its native surrounding.

[0297] The skilled artisan is well aware of the genetic elements that must be present on the genetic construct in order to successfully transform, select and propagate host cells containing the sequence of interest. The sequence of interest is operably linked to one or more control sequences (at least to a promoter).

[0298] Advantageously, any type of promoter, whether natural or synthetic, may be used to drive expression of the nucleic acid sequence, but preferably the promoter is of plant origin. A constitutive promoter is particularly useful in the methods. See the “Definitions” section herein for definitions of the various promoter types.

[0299] The constitutive promoter is preferably a ubiquitous constitutive promoter of medium strength. More preferably it is a plant derived promoter, e.g. a promoter of plant chromosomal origin, such as a GOS2 promoter or a promoter of substantially the same strength and having substantially the same expression pattern (a functionally equivalent promoter), more preferably the promoter is the promoter GOS2 promoter from rice. Further preferably the constitutive promoter is represented by a nucleic acid sequence substantially similar to SEQ ID NO: 310, most preferably the constitutive promoter is as represented by SEQ ID NO: 310. See the “Definitions” section herein for further examples of constitutive promoters.

[0300] It should be clear that the applicability of the present invention is not restricted to the FKBP16-3 polypeptide-encoding nucleic acid represented by SEQ ID NO: 1, nor is the applicability of the invention restricted to the rice GOS2 promoter when expression of a FKBP16-3 polypeptide-encoding nucleic acid is driven by a constitutive promoter.

[0301] In a particular embodiment the nucleic acid encoding the FKBP16-3 polypeptide useful in the methods, constructs, plants, harvestable parts and products of the invention is in functional linkage to a promoter resulting in the expression of the FKBP16-3 nucleic acid in
[0302] aboveground biomass preferably the leaves and shoot, more preferably the stem, of monocot plants, preferably Poaceae plants, more preferably Saccharum species plants, and/or
[0303] leaves, below-ground biomass and/or root biomass, preferably tubers, taproots and/or beet organs, more preferably taproot and beet organs of dicot plants, more preferably Solanaceae and/or Beta species plants.

[0304] Yet another embodiment relates to genetic constructs useful in the methods, constructs, plants, harvestable parts and products of the invention wherein the genetic construct comprises the FKBP16-3 nucleic acid of the invention functionally linked a promoter as disclosed herein above and further functionally linked to one or more of

[0305] 1) nucleic acid expression enhancing nucleic acids (NEENAs):
[0306] a) as disclosed in the international patent application published as WO2011/023537 in Table 1 on page 27 to page 28 and/or SEQ ID NO: 1 to 19 and/or as defined in items i) to vi) of claim 1 of said international application which NEENAs are herewith incorporated by reference; and/or
[0307] b) as disclosed in the international patent application published as WO2011/023539 in Table 1 on page 27 and/or SEQ ID NO: 1 to 19 and/or as defined in items i) to vi) of claim 1 of said international application which NEENAs are herewith incorporated by reference; and/or
[0308] c) as contained in or disclosed in:
[0309] (i) the European priority application filed on 05 July 2011 as EP 11172672.5 in Table 1 on page 27 and/or SEQ ID NO: 1 to 14937, preferably SEQ ID NO: 1 to 5, 14936 or 14937, and/or as defined in items i) to v) of claim 1 of said European priority application which NEENAs are herewith incorporated by reference; and/or
[0310] (ii) the European priority application filed on 06 July 2011 as EP 11172825.9 in Table 1 on page 27 and/or SEQ ID NO: 1 to 65560, preferably SEQ ID NO: 1 to 3, and/or as defined in items i) to v) of claim 1 of said European priority application which NEENAs are herewith incorporated by reference; and/or
[0311] d) equivalents having substantially the same enhancing effect; and/or 2) functionally linked to one or more Reliability Enhancing Nucleic Acid (RENA) molecule
[0312] a) as contained in or disclosed in the European priority application filed on 15 Sep. 2011 as EP 11181420.8 in Table 1 on page 26 and/or SEQ ID NO: 1 to 16 or 94 to 116666, preferably SEQ ID NO: 1 to 16, and/or as defined in point i) to v) of item a) of claim 1 of said European priority application which RENA molecule(s) are herewith incorporated by reference; or
[0313] b) equivalents having substantially the same enhancing effect.

[0314] A preferred embodiment of the invention relates to a nucleic acid molecule useful in the methods, constructs, plants, harvestable parts and products of the invention and encoding a FKBP16-3 polypeptide of the invention under the control of a promoter as described herein above, wherein the NEENA, RENA and/or the promoter is heterologous to the FKBP16-3 nucleic acid molecule of the invention.

[0315] Optionally, one or more terminator sequences may be used in the construct introduced into a plant. Those skilled in the art will be aware of terminator sequences that may be suitable for use in performing the invention. Preferably, the construct comprises an expression cassette comprising a GOS2 promoter operably linked to the nucleic acid encoding the FKBP16-3 polypeptide. More preferably, the construct furthermore comprises a zein terminator (t-zein) linked to the 3′ end of the FKBP16-3 coding sequence. Furthermore, one or more sequences encoding selectable markers may be present on the construct introduced into a plant.

[0316] According to a preferred feature of the invention, the modulated expression is increased expression. Methods for increasing expression of nucleic acids or genes, or gene products, are well documented in the art and examples are provided in the definitions section.

[0317] As mentioned above, a preferred method for modulating expression of a nucleic acid encoding a FKBP16-3 polypeptide is by introducing, preferably by recombinant methods, and expressing in a plant a nucleic acid encoding a FKBP16-3 polypeptide; however the effects of performing the method, i.e. enhancing one or more yield-related traits may also be achieved using other well known techniques, including but not limited to T-DNA activation tagging, TILLING, homologous recombination. A description of these techniques is provided in the definitions section.

[0318] The invention also provides a method for the production of transgenic plants having one or more enhanced yield-related traits relative to control plants, comprising introduction and expression in a plant of any nucleic acid encoding a FKBP16-3 polypeptide as defined herein.

[0319] More specifically, the present invention provides a method for the production of transgenic plants having one or more enhanced yield-related traits, particularly increased aboveground biomass, which method comprises:
[0320] (i) introducing and expressing in a plant or plant cell a recombinant FKBP16-3 polypeptide-encoding nucleic acid or a genetic construct comprising a FKBP16-3 polypeptide-encoding nucleic acid; and
[0321] (ii) cultivating the plant cell under conditions promoting plant growth and development.

[0322] Preferably, the introduction of the FKBP16-3 nucleic acid is by recombinant methods.

[0323] Cultivating the plant cell under conditions promoting plant growth and development, may or may not include regeneration and/or growth to maturity. Accordingly, in a particular embodiment of the invention, the plant cell transformed by the method according to the invention is regenerable into a transformed plant. In another particular embodiment, the plant cell transformed by the method according to the invention is not regenerable into a transformed plant, i.e. cells that are not capable to regenerate into a plant using cell culture techniques known in the art. While plants cells generally have the characteristic of totipotency, some plant cells can not be used to regenerate or propagate intact plants from said cells. In one embodiment of the invention the plant cells of the invention are such cells. In another embodiment the plant cells of the invention are plant cells that do not sustain themselves in an autotrophic way. One example are plant cells that do not sustain themselves through photosynthesis by synthesizing carbohydrate and protein from such inorganic substances as water, carbon dioxide and mineral salt.

[0324] The nucleic acid may be introduced directly into a plant cell or into the plant itself (including introduction into a tissue, organ or any other part of a plant). According to a preferred feature of the present invention, the nucleic acid is preferably introduced into a plant or plant cell by transformation. The term “transformation” is described in more detail in the “definitions” section herein.

[0325] In one embodiment a method for the production of a transgenic sugarcane plant, a transgenic part thereof, or a transgenic plant cell thereof, having one or more enhanced yield-related traits relative to control plants, comprises the step of harvesting setts from the transgenic plant and planting the setts and growing the setts to plants, wherein the setts comprises the exogenous nucleic acid encoding the FKBP16-3 polypeptide and the promoter sequence operably linked thereto.

[0326] In one embodiment the present invention extends to any plant cell or plant produced by any of the methods described herein, and to all plant parts and propagules thereof.

[0327] The present invention encompasses plants or parts thereof (including seeds) obtainable by the methods according to the present invention. The plants or plant parts or plant cells comprise a nucleic acid transgene encoding a FKBP16-3 polypeptide as defined above, preferably in a genetic construct such as an expression cassette. The present invention extends further to encompass the progeny of a primary transformed or transfected cell, tissue, organ or whole plant that has been produced by any of the aforementioned methods, the only requirement being that progeny exhibit the same genotypic and/or phenotypic characteristic(s) as those produced by the parent in the methods according to the invention.

[0328] In a further embodiment the invention extends to seeds recombinantly comprising the expression cassettes of the invention, the genetic constructs of the invention, or the nucleic acids encoding the FKBP16-3 and/or the FKBP16-3 polypeptides as described above.

[0329] The invention also includes host cells containing an isolated nucleic acid encoding a FKBP16-3 polypeptide as defined above. In one embodiment host cells according to the invention are plant cells, yeasts, bacteria or fungi. Host plants for the nucleic acids, construct, expression cassette or the vector used in the method according to the invention are, in principle, advantageously all plants which are capable of synthesizing the polypeptides used in the inventive method. In a particular embodiment the plant cells of the invention overexpress the nucleic acid molecule of the invention.

[0330] The methods of the invention are advantageously applicable to any plant, in particular to any plant as defined herein. Plants that are particularly useful in the methods of the invention include all plants which belong to the superfamily Viridiplantae, in particular monocotyledonous and dicotyledonous plants including fodder or forage legumes, ornamental plants, food crops, trees or shrubs. According to an embodiment of the present invention, the plant is a crop plant. Examples of crop plants include but are not limited to chicory, carrot, cassava, trefoil, soybean, beet, sugar beet, sunflower, canola, alfalfa, rapeseed, linseed, cotton, tomato, potato and tobacco. According to another embodiment of the present invention, the plant is a monocotyledonous plant. Examples of monocotyledonous plants include sugarcane. According to another embodiment of the present invention, the plant is a cereal. Examples of cereals include rice, maize, wheat, barley, millet, rye, triticale, sorghum, emmer, spelt, einkorn, teff, milo and oats. In a particular embodiment the plants of the invention, or used in the methods of the invention, are selected from the group consisting of maize, wheat, rice, soybean, cotton, oilseed rape including canola, sugarcane, sugar beet and alfalfa. Advantageously the methods of the invention are more efficient than the known methods, because the plants of the invention have increased yield and/or tolerance to an environmental stress compared to control plants used in comparable methods.

[0331] The invention also extends to harvestable parts of a plant such as, but not limited to seeds, leaves, fruits, flowers, stems, roots, rhizomes, tubers and bulbs, which harvestable parts comprise a recombinant nucleic acid encoding a FKBP16-3 polypeptide. In particular, such harvestable parts are roots such as taproots, rhizomes, fruits, stems, beets, tubers, bulbs, leaves, flowers and/or seeds. In one embodiment harvestable parts are stem cuttings (like setts of sugar cane).

[0332] The invention furthermore relates to products derived or produced, preferably directly derived or directly produced, from a harvestable part of such a plant, such as dry pellets, pressed stems, meal or powders, oil, fat and fatty acids, carbohydrates, sap, juice or proteins. Preferred carbohydrates are starch, cellulose or sugars, preferably sucrose. Also preferred products are residual dry fibers, e.g., of the stem (like bagasse from sugar cane after cane juice removal), molasse, or filtercake, preferably from sugar cane. In one embodiment the product comprises a recombinant nucleic acid encoding a FKBP16-3 polypeptide and/or a recombinant FKBP16-3 polypeptide for example as an indicator of the particular quality of the product.

[0333] The invention also includes methods for manufacturing a product comprising a) growing the plants of the invention and b) producing said product from or by the plants of the invention or parts thereof, including stem, root, beet and/or seeds. In a further embodiment the methods comprise the steps of a) growing the plants of the invention, b) removing the harvestable parts as described herein from the plants and c) producing said product from, or with the harvestable parts of plants according to the invention. In one embodiment, the product is produced from the stem of the transgenic plant.

[0334] In a further embodiment the products produced by the manufacturing methods of the invention are plant products such as, but not limited to, a foodstuff, feedstuff, a food supplement, feed supplement, fiber, cosmetic or pharmaceutical. In another embodiment the methods for production are used to make agricultural products such as, but not limited to, plant extracts, proteins, amino acids, carbohydrates, fats, oils, polymers, vitamins, and the like.

[0335] In yet another embodiment the polynucleotides or the polypeptides or the constructs of the invention are comprised in an agricultural product. In a particular embodiment the nucleic acid sequences and protein sequences of the invention may be used as product markers, for example where an agricultural product was produced by the methods of the invention. Such a marker can be used to identify a product to have been produced by an advantageous process resulting not only in a greater efficiency of the process but also improved quality of the product due to increased quality of the plant material and harvestable parts used in the process. Such markers can be detected by a variety of methods known in the art, for example but not limited to PCR based methods for nucleic acid detection or antibody based methods for protein detection.

[0336] The present invention also encompasses use of isolated nucleic acids encoding FKBP16-3 polypeptides as described herein and use of these FKBP16-3 polypeptides in enhancing any of the aforementioned yield-related traits in plants. For example, nucleic acids encoding FKBP16-3 polypeptide described herein, or the FKBP16-3 polypeptides themselves, may find use in breeding programmes in which a DNA marker is identified which may be genetically linked to a FKBP16-3 polypeptide-encoding gene. The nucleic acids/genes, or the FKBP16-3 polypeptides themselves may be used to define a molecular marker. This DNA or protein marker may then be used in breeding programmes to select plants having one or more enhanced yield-related traits as defined herein in the methods of the invention. Furthermore, allelic variants of a FKBP16-3 polypeptide-encoding nucleic acid/gene may find use in marker-assisted breeding programmes. Nucleic acids encoding FKBP16-3 polypeptides may also be used as probes for genetically and physically mapping the genes that they are a part of, and as markers for traits linked to those genes. Such information may be useful in plant breeding in order to develop lines with desired phenotypes.

[0337] Concerning QRR:

[0338] The present invention shows that modulating expression in a plant of a nucleic acid encoding a QRR polypeptide gives plants grown under abiotic stress, particularly under nitrogen deficiency, having enhanced yield-related traits relative to control plants.

[0339] According to a first embodiment and as experimentally shown in Example 20, the present invention provides a method for enhancing yield-related traits in plants under abiotic stress, particularly under nitrogen deficiency relative to control plants, comprising modulating expression in a plant of a nucleic acid encoding a QRR polypeptide and optionally selecting for plants having enhanced yield-related traits. According to another embodiment, the present invention provides a method for producing plants having enhanced yield-related traits under abiotic stress, particularly under nitrogen deficiency relative to control plants, wherein said method comprises the steps of modulating expression in said plant of a nucleic acid encoding a QRR polypeptide as described herein and optionally selecting for plants having enhanced yield-related traits.

[0340] In one embodiment, the present invention provides a method for modulating expression in a plant of a nucleic acid encoding a QRR polypeptide, giving plants grown under non-biotic stress having enhanced yield-related traits relative to control plants.

[0341] In one embodiment, the present invention provides a method for modulating expression in a plant of a nucleic acid encoding a QRR polypeptide, giving plants grown under non-stress and stress conditions excluding biotic stress having enhanced yield-related traits relative to control plants.

[0342] A preferred method for modulating (preferably, increasing) expression of a nucleic acid encoding a QRR polypeptide is by introducing and expressing in a plant a nucleic acid encoding a QRR polypeptide, preferably a recombinant nucleic acid encoding a QRR polypeptide.

[0343] Any reference hereinafter to a “protein useful in the methods of the invention” is taken to mean a QRR polypeptide as defined herein. Any reference hereinafter to a “nucleic acid useful in the methods of the invention” is taken to mean a nucleic acid capable of encoding such a QRR polypeptide. In one embodiment any reference to a protein or nucleic acid “useful in the methods of the invention” is to be understood to mean proteins or nucleic acids “useful in the methods, constructs, plants, harvestable parts and products of the invention”. The nucleic acid to be introduced into a plant (and therefore useful in performing the methods of the invention) is any nucleic acid encoding the type of protein which will now be described, hereafter also named “QRR nucleic acid” or “QRR gene”.

[0344] The terms “quinone reductase-related polypeptide”, “quinone reductase-related protein” or “ QRR polypeptide” or “QRR protein”, as given herein are all intended to include a polypeptide belonging to the superfamily of Medium-chain Dehydrogenases/Reductases (MDR), preferably belonging to MDR27, more preferably belonging to MDR27 originating from monocotyledonous plant, preferably originating from Triticum aestivum. An MDR polypeptide typically consists of two domains, where the C-terminal domain is coenzyme-binding with ubiquitous Rossmann fold of an often sixstranded parallel b-sheet sandwiched between a-helices on each side. The N-terminal domain is substrate binding with a core of antiparallel b-strands and surfacepositioned a-helices, showing distant homology with the GroES structure. The domains are separated by a cleft containing a deep pocket which accommodates the active site (Hedlund et al., 2010).

[0345] The polypeptide as used and defined herein has a quinone reducing activity and/or comprises one or more of InterPro domains represented by accession number IPR002085, IPR011032, IPR013154 and IPR020843. Further, this term encompasses any polypeptide comprising one or more of motifs 1 to 9 and/or motif group A and/or B as defined herein.

[0346] Morevover, the polypeptides as used and defined herein comprise any polypeptides as listed and defined in Table A2.

[0347] Motifs 8 to 16 were derived using the MEME algorithm (Bailey and Elkan, Proceedings of the Second International Conference on Intelligent Systems for Molecular Biology, pp. 28-36, AAAI Press, Menlo Park, Calif., 1994). At each position within a MEME motif, the residues are shown that are present in the query set of sequences with a frequency higher than 0.2. Residues within square brackets represent alternatives.

[0348] In one embodiment, the QRR polypeptide as used herein comprises one or more of the motifs 8, 9, 10, 11, 12, 13, 14, 15 or 16:

Motif 8 (SEQ ID NO: 681):
YAVQLAKL[AG][NG][TAL][HR]VTATCGARN
Motif 9 (SEQ ID NO: 682):
LGADE[VA][MLI]DY[KR]TP[EDQ]GA[SAKI]L[KRQ]SPS
Motif 10 (SEQ ID NO: 683):
[GA]L[KQ][HF]VE[VIL]P[VI]P[STAM][APV]KK[NDG]E
[VL]L[LI][KR][LMV][EQ]A[TA][ST][IVL]N[PQV]
[VI]DWK
Motif 11 (SEQ ID NO: 684):
[GA]L[KQ][HF]VE[VIL]P[VI]P[STAM][APV]KK[NDG]E
[VL]L[LI][KR][LMV][EQ]A[TA][ST][IVL]N[PQV]
[VI]DWK[IF]Q[KN]G[MDL][LVMA]RP[FL][LMH]P
Motif 12 (SEQ ID NO: 685):
E[VA][LM]DY[KRAN]TP[ED]G[AT][ASTRK][LM][RQT]S
[PS][SA][GS][RKT][KRE][YK]
Motif 13 (SEQ ID NO: 686):
AAS[GS][GA]VG[HLT][YF][APL]V[QH]LA[KRS][LMR]
[AG][GN][LH][HR][VIY][TR]A[TL][CR]G[AR][RN]
[NM]
Motif 14 (SEQ ID NO: 687):
[TH][CL][GR][AG][RG]N[VMA][ED]L[VL][KR][SG]LG
ADEV[LM]DY[RK]TPEGA[ST][LM][QR]SPSG[KR][KR]Y
[DN][GV]VVHC[TA][VA][GR][VIT][SG]W[SP]
Motif 15 (SEQ ID NO: 688):
[HL]VE[VL]PVP[STMA]A[KQ]KNE[VL]LLKL[EQ][AV]A
[TS][IV]NPVDWK[IVL]QKG[DML][LM][RQ]P[LFI]LPR
[RK][LF]PFIPVTD
Motif 16 (SEQ ID NO: 689):
NKADLEFLVGL[LV][KGE][EDG]G[KN][LM][KRE]T[VL]
[IV]DS[RK]F[PSL]L[SG][ED][AV][SGDA]KAW[QE]
[KST]S[IV][DE]GH[AP]TGKI[VI]VEM

[0349] In a further embodiment, the QRR polypeptide as used herein comprises one or more of the motifs represented by Group A comprising motifs 11 to 16.

[0350] In a further embodiment, the QRR polypeptide as used herein comprises one or more of the motifs represented by Group B comprising motifs 14 to 16.

[0351] In still another embodiment, the QRR polypeptide comprises in increasing order of preference, at least 2, at least 3, at least 4, at least 5, at least 6, at least 7, at least 8, or all 9 motifs as defined above.

[0352] Additionally or alternatively, the QRR protein has in increasing order of preference at least 25%, 26%, 27%, 28%, 29%, 30%, 31%, 32%, 33%, 34%, 35%, 36%, 37%, 38%, 39%, 40%, 41%, 42%, 43%, 44%, 45%, 46%, 47%, 48%, 49%, 50%, 51%, 52%, 53%, 54%, 55%, 56%, 57%, 58%, 59%, 60%, 61%, 62%, 63%, 64%, 65%, 66%, 67%, 68%, 69%, 70%, 71%, 72%, 73%, 74%, 75%, 76%, 77%, 78%, 79%, 80%, 81%, 82%, 83%, 84%, 85%, 86%, 87%, 88%, 89%, 90%, 91%, 92%, 93%, 94%, 95%, 96%, 97%, 98%, or 99% overall sequence identity to the amino acid sequence represented by SEQ ID NO: 312, provided that the homologous protein comprises any one or more of the conserved domains and/or motifs as outlined above. The overall sequence identity is determined using a global alignment algorithm, such as the Needleman Wunsch algorithm in the program GAP (GCG Wisconsin Package, Accelrys), preferably with default parameters and preferably with sequences of mature proteins (i.e. without taking into account secretion signals or transit peptides). In one embodiment the sequence identity level is determined by comparison of the polypeptide sequences over the entire length of the sequence of SEQ ID NO: 312. Alternatively the sequence identity is determined by comparison of a nucleic acid sequence to the sequence encoding the mature protein in SEQ ID NO: 311.

[0353] In another embodiment, the sequence identity level is determined by comparison of one or more conserved domains or motifs in SEQ ID NO: 312 with corresponding conserved domains or motifs in other QRR polypeptides. Compared to overall sequence identity, the sequence identity will generally be higher when only conserved domains and/or motifs are considered. Preferably the motifs in a QRR polypeptide have, in increasing order of preference, at least 70%, 71%, 72%, 73%, 74%, 75%, 76%, 77%, 78%, 79%, 80%, 81%, 82%, 83%, 84%, 85%, 86%, 87%, 88%, 89%, 90%, 91%, 92%, 93%, 94%, 95%, 96%, 97%, 98%, or 99% sequence identity to one or more of the motifs represented by SEQ ID NO: 681 to SEQ ID NO: 689 (Motifs 8 to 16) and/or a group A motif and/or a group B motif. In another embodiment a method for enhancing yield-related traits in plants is provided wherein said QRR polypeptide comprises a conserved domain/sequence with at least 70%, 71%, 72%, 73%, 74%, 75%, 76%, 77%, 78%, 79%, 80%, 81%, 82%, 83%, 84%, 85%, 86%, 87%, 88%, 89%, 90%, 91%, 92%, 93%, 94%, 95%, 96%, 97%, 98%, or 99% sequence identity to the conserved domain/sequence starting with amino acid 1 up to amino acid 335 in SEQ ID NO: 312.

[0354] The terms “domain”, “signature” and “motif” are defined in the “definitions” section herein.

[0355] Furthermore, QRR polypeptides as used and defined herein typically have quinone reductase activity. Tools and techniques for measuring quinone reductase activity are well known in the art; see for example Bandaranayake et al., Plant Cell 22(4): 1404-1409, 2010. In addition, nucleic acids encoding QRR polypeptides as used and defined herein, when expressed in rice according to the methods of the present invention as outlined in Examples 17 and 19, give plants having increased yield related traits compared to control plants, in particular increased above ground biomass (AreaMax), increased early height of the plant (EarlyHeight), increased height of the gravity centre of the leafy biomass of the plant (GravityYMax). Another function of the nucleic acid sequences encoding QRR polypeptides is to confer information for synthesis of the QRR protein that increases yield or yield related traits as described herein, when such a nucleic acid sequence of the invention is transcribed and translated in a living plant cell.

[0356] According one embodiment, there is provided a method for improving yield-related traits as provided herein in plants under abiotic stress, particularly under nitrogen deficiency relative to control plants, comprising modulating expression in a plant of a nucleic acid encoding a QRR polypeptide as defined herein.

[0357] The present invention is illustrated by transforming plants with the nucleic acid sequence represented by SEQ ID NO: 311, encoding the polypeptide sequence of SEQ ID NO: 312. However, performance of the invention is not restricted to these sequences; the methods of the invention may advantageously be performed using any QRR-encoding nucleic acid or QRR polypeptide as defined herein. The term “QRR” or “QRR polypeptide” as used herein also intends to include homologues as defined hereunder of SEQ ID NO: 312.

[0358] Examples of nucleic acids encoding QRR polypeptides are given in Table A2 of the Examples section herein. Such nucleic acids are useful in performing the methods of the invention. The amino acid sequences given in Table A2 of the Examples section are example sequences of orthologues and paralogues of the QRR polypeptide represented by SEQ ID NO: 312, the terms “orthologues” and “paralogues” being as defined herein. Further orthologues and paralogues may readily be identified by performing a so-called reciprocal blast search as described in the definitions section; where the query sequence is SEQ ID NO: 311 or SEQ ID NO: 312, the second BLAST (back-BLAST) would be against wheat sequences.

[0359] The invention also provides hitherto unknown QRR-encoding nucleic acids and QRR polypeptides useful for conferring enhanced yield-related traits in plants under abiotic stress relative to control plants.

[0360] According to a further embodiment of the present invention, there is therefore provided an isolated nucleic acid molecule selected from the group consisting of:
[0361] (i) a nucleic acid represented by SEQ ID NO: 311;
[0362] (ii) the complement of a nucleic acid represented by SEQ ID NO: 311;
[0363] (iii) a nucleic acid encoding a QRR polypeptide having in increasing order of preference at least 50%, 51%, 52%, 53%, 54%, 55%, 56%, 57%, 58%, 59%, 60%, 61%, 62%, 63%, 64%, 65%, 66%, 67%, 68%, 69%, 70%, 71%, 72%, 73%, 74%, 75%, 76%, 77%, 78%, 79%, 80%, 81%, 82%, 83%, 84%, 85%, 86%, 87%, 88%, 89%, 90%, 91%, 92%, 93%, 94%, 95%, 96%, 97%, 98%, or 99% sequence identity to the amino acid sequence represented by SEQ ID NO: 312 and additionally or alternatively comprising one or more motifs having in increasing order of preference at least 50%, 55%, 60%, 65%, 70%, 75%, 80%, 85%, 90%, 95%, 96%, 97%, 98%, 99% or more sequence identity to any one or more of the motifs given in SEQ ID NO: 681 to SEQ ID NO: 689 and/or a group A motif and/or a group B motif, and further preferably conferring enhanced yield-related traits relative to control plants; and
[0364] (iv) a nucleic acid molecule which hybridizes with a nucleic acid molecule of (i) to (iii) under high stringency hybridization conditions and preferably confers enhanced yield-related traits relative to control plants.

[0365] According to a further embodiment of the present invention, there is also provided an isolated polypeptide selected from the group consisting of:
[0366] (i) an amino acid sequence represented by SEQ ID NO: 312;
[0367] (ii) an amino acid sequence having, in increasing order of preference, at least 50%, 51%, 52%, 53%, 54%, 55%, 56%, 57%, 58%, 59%, 60%, 61%, 62%, 63%, 64%, 65%, 66%, 67%, 68%, 69%, 70%, 71%, 72%, 73%, 74%, 75%, 76%, 77%, 78%, 79%, 80%, 81%, 82%, 83%, 84%, 85%, 86%, 87%, 88%, 89%, 90%, 91%, 92%, 93%, 94%, 95%, 96%, 97%, 98%, or 99% sequence identity to the amino acid sequence represented by SEQ ID NO: 312, and additionally or alternatively comprising one or more motifs having in increasing order of preference at least 50%, 55%, 60%, 65%, 70%, 75%, 80%, 85%, 90%, 95%, 96%, 97%, 98%, 99% or more sequence identity to any one or more of the motifs given in SEQ ID NO: 681 to SEQ ID NO: 689 and/or motif group A and/or B, and further preferably conferring enhanced yield-related traits relative to control plants;
[0368] (iii) derivatives of any of the amino acid sequences given in (i) or (ii) above.

[0369] Nucleic acid variants may also be useful in practising the methods of the invention. Examples of such variants include nucleic acids encoding homologues and derivatives of any one of the amino acid sequences given in Table A2 of the Examples section, preferably homologues and derivatives of SEQ ID NO: 311, the terms “homologue” and “derivative” being as defined herein. Also useful in the methods, constructs, plants, harvestable parts and products of the invention are nucleic acids encoding homologues and derivatives of orthologues or paralogues of any one of the amino acid sequences given in Table A2 of the Examples section. Homologues and derivatives useful in the methods of the present invention have substantially the same biological and functional activity as the unmodified protein from which they are derived. Further variants useful in practising the methods of the invention are variants in which codon usage is optimised or in which miRNA target sites are removed.

[0370] Further nucleic acid variants useful in practising the methods of the invention include portions of nucleic acids encoding QRR polypeptides, nucleic acids hybridising to nucleic acids encoding QRR polypeptides, splice variants of nucleic acids encoding QRR polypeptides, allelic variants of nucleic acids encoding QRR polypeptides and variants of nucleic acids encoding QRR polypeptides obtained by gene shuffling. The terms hybridising sequence, splice variant, allelic variant and gene shuffling are as described herein.

[0371] Nucleic acids encoding QRR polypeptides need not be full-length nucleic acids, since performance of the methods of the invention does not rely on the use of full-length nucleic acid sequences. According to the present invention, there is provided a method for enhancing yield-related traits in plants, comprising introducing and expressing in a plant a portion of any one of the nucleic acid sequences given in Table A2 of the Examples section, or a portion of a nucleic acid encoding an orthologue, paralogue or homologue of any of the amino acid sequences given in Table A2 of the Examples section.

[0372] A portion of a nucleic acid may be prepared, for example, by making one or more deletions to the nucleic acid. The portions may be used in isolated form or they may be fused to other coding (or non-coding) sequences in order to, for example, produce a protein that combines several activities. When fused to other coding sequences, the resultant polypeptide produced upon translation may be bigger than that predicted for the protein portion.

[0373] Portions useful in the methods, constructs, plants, harvestable parts and products of the invention, encode a QRR polypeptide as defined herein or at least part thereof, and have substantially the same biological activity as the amino acid sequences given in Table A2 of the Examples section. Preferably, the portion is a portion of any one of the nucleic acids given in Table A2 of the Examples section, or is a portion of a nucleic acid encoding an orthologue or paralogue of any one of the amino acid sequences given in Table A2 of the Examples section. Preferably the portion is at least 500, 550, 600, 650, 700, 750, 800, 850, 900, 950, 1000 consecutive nucleotides in length, the consecutive nucleotides being of any one of the nucleic acid sequences given in Table A2 of the Examples section, or of a nucleic acid encoding an orthologue or paralogue of any one of the amino acid sequences given in Table A2 of the Examples section. Most preferably the portion is a portion of the nucleic acid of SEQ ID NO: 311. Preferably, the portion encodes a fragment of an amino acid sequence which comprises one or more of the motifs 8 to 16 and/or a group A motif and/or a group B motif as defined herein, and/or has a quinone reducing activity, and/or has at least 35% sequence identity to SEQ ID NO: 312.

[0374] Another nucleic acid variant useful in the methods, constructs, plants, harvestable parts and products of the invention is a nucleic acid capable of hybridising, under reduced stringency conditions, preferably under stringent conditions, more preferably under conditions of high stringency, with a nucleic acid encoding a QRR polypeptide as defined herein, or with a portion as defined herein. According to the present invention, there is provided a method for enhancing yield-related traits in plants, comprising introducing, preferably by recombinant methods, and expressing in a plant a nucleic acid capable of hybridizing to the complement of a nucleic acid encoding any one of the proteins given in Table A2 of the Examples section, or to the complement of a nucleic acid encoding an orthologue, paralogue or homologue of any one of the proteins given in Table A2.

[0375] Hybridising sequences useful in the methods, constructs, plants, harvestable parts and products of the invention encode a QRR polypeptide as defined herein, having substantially the same biological activity as the amino acid sequences given in Table A2 of the Examples section. Preferably, the hybridising sequence is capable of hybridising to the complement of a nucleic acid encoding any one of the proteins given in Table A2 of the Examples section, or to a portion of any of these sequences, a portion being as defined herein, or the hybridising sequence is capable of hybridising to the complement of a nucleic acid encoding an orthologue or paralogue of any one of the amino acid sequences given in Table A2 of the Examples section. Most preferably, the hybridising sequence is capable of hybridising to the complement of a nucleic acid encoding the polypeptide as represented by SEQ ID NO: 312 or to a portion thereof. In one embodiment, the hybridization conditions are of medium stringency, preferably of high stringency, as defined herein. Preferably, the hybridising sequence encodes a polypeptide with an amino acid sequence which comprises one or more of the motifs 8, 9, 10, 11, 12, 13, 14, 15, 16 and/or a group A motif and/or a group B motif as defined herein, and/or has a quinone reducing activity, and/or has at least 35% sequence identity to SEQ ID NO: 312.

[0376] In another embodiment, there is provided a method for enhancing yield-related traits in plants under abiotic stress relative to control plants, comprising introducing, preferably by recombinant methods, and expressing in a plant a splice variant of a nucleic acid encoding any one of the proteins given in Table A2 of the Examples section, or a splice variant of a nucleic acid encoding an orthologue, paralogue or homologue of any of the amino acid sequences given in Table A2 of the Examples section.

[0377] Preferred splice variants are splice variants of a nucleic acid represented by SEQ ID NO: 311, or a splice variant of a nucleic acid encoding an orthologue or paralogue of SEQ ID NO: 312. Preferably, the amino acid sequence encoded by the splice variant comprises one or more of the motifs 8, 9, 10, 11, 12, 13, 14, 15, 16 and/or a group A motif and/or a group B motif as defined herein, and/or has a quinone reducing activity, and/or has at least 35% sequence identity to SEQ ID NO: 312.

[0378] In yet another embodiment, there is provided a method for enhancing yield-related traits in plants under abiotic stress relative to control plants, comprising introducing, preferably by recombinant methods, and expressing in a plant an allelic variant of a nucleic acid encoding any one of the proteins given in Table A2 of the Examples section, or comprising introducing and expressing in a plant an allelic variant of a nucleic acid encoding an orthologue, paralogue or homologue of any of the amino acid sequences given in Table A2 of the Examples section.

[0379] The polypeptides encoded by allelic variants useful in the methods of the present invention have substantially the same biological activity as the QRR polypeptide of SEQ ID NO: 312 and any of the amino acid sequences depicted in Table A2 of the Examples section. Allelic variants exist in nature, and encompassed within the methods of the present invention is the use of these natural alleles. Preferably, the allelic variant is an allelic variant of SEQ ID NO: 311 or an allelic variant of a nucleic acid encoding an orthologue or paralogue of SEQ ID NO: 312. Preferably, the amino acid sequence encoded by the allelic variant comprises one or more of the motifs 8, 9, 10, 11, 12, 13, 14, 15, 16 and/or a group A motif and/or a group B motif as defined herein, and/or has a quinone reducing activity, and/or has at least 35% sequence identity to SEQ ID NO: 312.

[0380] In yet another embodiment, there is provided a method for enhancing yield-related traits in plants under abiotic stress relative to control plants, comprising introducing, preferably by recombinant methods, and expressing in a plant a variant of a nucleic acid encoding any one of the proteins given in Table A2 of the Examples section, or comprising introducing, preferably by recombinant methods, and expressing in a plant a variant of a nucleic acid encoding an orthologue, paralogue or homologue of any of the amino acid sequences given in Table A2 of the Examples section, which variant nucleic acid is obtained by gene shuffling.

[0381] Preferably, the amino acid sequence encoded by the variant nucleic acid obtained by gene shuffling comprises one or more of the motifs 8, 9, 10, 11, 12, 13, 14, 15, 16 and/or motif group A and/or B as defined herein, and/or has a quinone reducing activity, and/or has at least 35% sequence identity to SEQ ID NO: 312.

[0382] Furthermore, nucleic acid variants may also be obtained by site-directed mutagenesis. Several methods are available to achieve site-directed mutagenesis, the most common being PCR based methods (Current Protocols in Molecular Biology. Wiley Eds.). QRR polypeptides differing from the sequence of SEQ ID NO: 312 by one or several amino acids (substitution(s), insertion(s) and/or deletion(s) as defined herein) may equally be useful to increase the yield of plants in the methods and constructs and plants of the invention.

[0383] Nucleic acids encoding QRR polypeptides may be derived from any natural or artificial source. The nucleic acid may be modified from its native form in composition and/or genomic environment through deliberate human manipulation. Preferably the QRR polypeptide-encoding nucleic acid is from a plant, further preferably from a monocotyledonous plant, more preferably from the family Poaceae, most preferably the nucleic acid is from Triticum aestivum.

[0384] In another embodiment the present invention extends to recombinant chromosomal DNA comprising a nucleic acid sequence useful in the methods of the invention, wherein said nucleic acid is present in the chromosomal DNA as a result of recombinant methods, but is not in its natural genetic environment. In a further embodiment the recombinant chromosomal DNA of the invention is comprised in a plant cell.

[0385] Performance of the methods of the invention gives plants having enhanced yield-related traits when grown under abiotic stress, particularly under nitrogen deficiency, relative to control plants. In particular performance of the methods of the invention gives plants having increased early vigour and/or increased yield, especially increased biomass and/or increased seed yield relative to control plants, most preferably comprise one or more of increased above ground biomass (AreaMax), increased early height of the plant (EarlyHeight), increased height of the gravity centre of the leafy biomass of the plant (GravityYMax), relative to control plants. The terms above are described in more detail in the “definitions” section herein.

[0386] The present invention thus provides a method for improving yield-related traits of plants grown under abiotic stress, particularly under nitrogen deficiency, relative to control plants, which method comprises modulating expression in a plant of a nucleic acid encoding a QRR polypeptide as described herein.

[0387] According to a preferred feature of the present invention, performance of the methods of the invention gives plants having an increased growth rate relative to control plants. Therefore, according to the present invention, there is provided a method for increasing the growth rate of plants, which method comprises modulating expression in a plant of a nucleic acid encoding a QRR polypeptide as defined herein.

[0388] Performance of the methods of the invention gives plants grown under non-stress conditions or under mild drought conditions increased yield-related traits relative to control plants grown under comparable conditions. Therefore, according to the present invention, there is provided a method for increasing yield-related traits in plants grown under non-stress conditions or under mild drought conditions, which method comprises modulating expression in a plant of a nucleic acid encoding a QRR polypeptide.

[0389] Performance of the methods of the invention gives plants grown under conditions of drought, increased yield-related traits relative to control plants grown under comparable conditions. Therefore, according to the present invention, there is provided a method for increasing yield-related traits in plants grown under conditions of drought which method comprises modulating expression in a plant of a nucleic acid encoding a QRR polypeptide.

[0390] Performance of the methods of the invention gives plants grown under conditions of nutrient deficiency, particularly under conditions of nitrogen deficiency, increased yield-related traits as defined and exemplified herein relative to control plants grown under comparable conditions. Therefore, according to the present invention, there is provided a method for increasing yield-related traits in plants grown under conditions of nutrient deficiency, which method comprises modulating expression in a plant of an isolated nucleic acid encoding a QRR polypeptide.

[0391] Performance of the methods of the invention gives plants grown under conditions of salt stress, increased yield-related traits relative to control plants grown under comparable conditions. Therefore, according to the present invention, there is provided a method for increasing yield-related traits in plants grown under conditions of salt stress, which method comprises modulating expression in a plant of a nucleic acid encoding a QRR polypeptide.

[0392] The invention also provides genetic constructs and vectors to facilitate introduction and/or expression in plants of nucleic acids encoding QRR polypeptides as used and defined herein. The gene constructs may be inserted into vectors, which may be commercially available, suitable for transforming into plants or host cells and suitable for expression of the gene of interest in the transformed cells. The invention also provides use of a gene construct as defined herein in the methods of the invention.

[0393] More specifically, the present invention provides a construct comprising:
[0394] (a) an isolated nucleic acid encoding a QRR polypeptide as defined herein;
[0395] (b) one or more control sequences capable of driving expression of the nucleic acid sequence of (a); and optionally
[0396] (c) a transcription termination sequence.

[0397] Preferably, the nucleic acid encoding a QRR polypeptide is as defined herein. In one embodiment the isolated QRR polypeptide encoding nucleic acid is selected from
[0398] (i) a nucleic acid represented by SEQ ID NO: 311;
[0399] (ii) the complement of a nucleic acid represented by SEQ ID NO: 311;
[0400] (iii) a nucleic acid encoding a QRR polypeptide having at least 95% sequence identity to the amino acid sequence represented by SEQ ID NO: 312 and additionally or alternatively comprising one or more motifs having in increasing order of preference at least 95% sequence identity to any one or more of the motifs given in SEQ ID NO: 681 to SEQ ID NO: 689, and further preferably conferring enhanced yield-related traits relative to control plants;
[0401] (iv) a nucleic acid molecule which hybridizes with a nucleic acid molecule of (i) to (iii) under high stringency hybridization conditions and preferably confers one or more enhanced yield-related traits relative to control plants.

[0402] The term “control sequence” and “termination sequence” are as defined herein.

[0403] In particular the genetic construct of the invention is a plant expression construct, i.e. a genetic construct that allows for the expression of the nucleic acid encoding a QRR polypeptide in a plant, plant cell or plant tissue after the construct has been introduced into this plant, plant cell or plant tissue, preferably by recombinant means. The plant expression construct may for example comprise said nucleic acid encoding a QRR polypeptide in functional linkage to a promoter and optionally other control sequences controlling the expression of said nucleic acid in one or more plant cells, wherein the promoter and optional the other control sequences are not natively found in functional linkage to the QRR nucleic acid. In a preferred embodiment the control sequence(s) including the promoter result in overexpression of the QRR nucleic acid when the construct of the invention has been introduced into a plant, plant cell or plant tissue.

[0404] The genetic construct of the invention may be comprised in a host cell, plant cell, seed, agricultural product or plant. Plants or host cells are transformed with a genetic construct such as a vector or an expression cassette comprising any of the nucleic acids as described herein. Thus the invention furthermore provides plants or host cells transformed with a construct as described herein. In particular, the invention provides plants transformed with a construct as described herein, which plants have increased yield-related traits as described herein when grown under abiotic stress, particularly under nitrogen deficiency, relative to control plants.

[0405] In one embodiment the genetic construct of the invention confers increased yield or yield related traits(s) to a plant when grown under abiotic stress, particularly under nitrogen deficiency, relative to control plants when it has been introduced into said plant, which plant expresses the nucleic acid encoding the QRR polypeptide comprised in the genetic construct and preferably resulting in increased abundance of the QRR polypeptide. In another embodiment the genetic construct of the invention confers increased yield or yield related traits(s) to a plant comprising plant cells in which the construct has been introduced, which plant cells express the nucleic acid encoding the QRR as described herein comprised in the genetic construct. The promoter in such a genetic construct may be a non-native promoter to the nucleic acid described above, i.e. a promoter different from the promoter regulating the expression of the QRR nucleic acid in its native surrounding.

[0406] The skilled artisan is well aware of the genetic elements that must be present on the genetic construct in order to successfully transform, select and propagate host cells containing the sequence of interest. The sequence of interest is operably linked to one or more control sequences (at least to a promoter).

[0407] Advantageously, any type of promoter, whether natural or synthetic, may be used to drive expression of the nucleic acid sequence, but preferably the promoter is of plant origin. A constitutive promoter is particularly useful in the methods. See the “Definitions” section herein for definitions of the various promoter types.

[0408] The constitutive promoter is preferably a ubiquitous constitutive promoter of medium strength. More preferably it is a plant derived promoter, e.g. a promoter of plant chromosomal origin, such as a GOS2 promoter or a promoter of substantially the same strength and having substantially the same expression pattern (a functionally equivalent promoter), more preferably the promoter is the promoter GOS2 promoter from rice. Further preferably the constitutive promoter is represented by a nucleic acid sequence substantially similar to SEQ ID NO: 692, most preferably the constitutive promoter is as represented by SEQ ID NO: 692. See the “Definitions” section herein for further examples of constitutive promoters.

[0409] It should be clear that the applicability of the present invention is not restricted to the QRR polypeptide-encoding nucleic acid represented by SEQ ID NO: 311, nor is the applicability of the invention restricted to the rice GOS2 promoter when expression of a QRR polypeptide-encoding nucleic acid is driven by a constitutive promoter.

[0410] In a particular embodiment the nucleic acid encoding the QRR polypeptide useful in the methods, constructs, plants, harvestable parts and products of the invention is in functional linkage to a promoter resulting in the expression of the QRR nucleic acid in
[0411] aboveground biomass preferably the leaves and shoot, more preferably the stem, of monocot plants, preferably Poaceae plants, more preferably Saccharum species plants, and/or
[0412] leaves, below-ground biomass and/or root biomass, preferably tubers, taproots and/or beet organs, more preferably taproot and beet organs of dicot plants, more preferably Solanaceae and/or Beta species plants.

[0413] Yet another embodiment relates to genetic constructs useful in the methods, constructs, plants, harvestable parts and products of the invention wherein the genetic construct comprises the QRR nucleic acid of the invention functionally linked a promoter as disclosed herein above and further functionally linked to one or more of

[0414] 1) nucleic acid expression enhancing nucleic acids (NEENAs):
[0415] a) as disclosed in the international patent application published as WO2011/023537 in Table 1 on page 27 to page 28 and/or SEQ ID NO: 1 to 19 and/or as defined in items i) to vi) of claim 1 of said international application which NEENAs are herewith incorporated by reference; and/or
[0416] b) as disclosed in the international patent application published as WO2011/023539 in Table 1 on page 27 and/or SEQ ID NO: 1 to 19 and/or as defined in items i) to vi) of claim 1 of said international application which NEENAs are herewith incorporated by reference; and/or
[0417] c) as contained in or disclosed in:
[0418] (i) the European priority application filed on 05 July 2011 as EP 11172672.5 in Table 1 on page 27 and/or SEQ ID NO: 1 to 14937, preferably SEQ ID NO: 1 to 5, 14936 or 14937, and/or as defined in items i) to v) of claim 1 of said European priority application which NEENAs are herewith incorporated by reference; and/or
[0419] (ii) the European priority application filed on 06 July 2011 as EP 11172825.9 in Table 1 on page 27 and/or SEQ ID NO: 1 to 65560, preferably SEQ ID NO: 1 to 3, and/or as defined in items i) to v) of claim 1 of said European priority application which NEENAs are herewith incorporated by reference; and/or
[0420] d) equivalents having substantially the same enhancing effect; and/or

[0421] 2) functionally linked to one or more Reliability Enhancing Nucleic Acid (RENA) molecule
[0422] a) as contained in or disclosed in the European priority application filed on 15 September 2011 as EP 11181420.8 in Table 1 on page 26 and/or SEQ ID NO: 1 to 16 or 94 to 116666, preferably SEQ ID NO: 1 to 16, and/or as defined in point i) to v) of item a) of claim 1 of said European priority application which RENA molecule(s) are herewith incorporated by reference; or
[0423] b) equivalents having substantially the same enhancing effect.

[0424] A preferred embodiment of the invention relates to a nucleic acid molecule useful in the methods, constructs, plants, harvestable parts and products of the invention and encoding a QRR polypeptide of the invention under the control of a promoter as described herein above, wherein the NEENA, RENA and/or the promoter is heterologous to the QRR nucleic acid molecule of the invention.

[0425] Optionally, one or more terminator sequences may be used in the construct introduced into a plant. Those skilled in the art will be aware of terminator sequences that may be suitable for use in performing the invention. Preferably, the construct comprises an expression cassette comprising a GOS2 promoter, substantially similar to SEQ ID NO: 692, operably linked to the nucleic acid encoding the QRR polypeptide as used and described herein.

[0426] According to a preferred feature of the invention, the modulated expression is increased expression. Methods for increasing expression of nucleic acids or genes, or gene products, are well documented in the art and examples are provided in the definitions section.

[0427] As mentioned above, a preferred method for modulating expression of a nucleic acid encoding a QRR polypeptide is by introducing, preferably by recombinant methods, and expressing in a plant a nucleic acid encoding a QRR polypeptide as described herein; however the effects of performing the method, i.e. enhancing yield-related traits may also be achieved using other well known techniques, including but not limited to T-DNA activation tagging, TILLING, homologous recombination. A description of these techniques is provided in the definitions section.

[0428] The invention also provides a method for the production of transgenic plants having enhanced yield-related traits relative to control plants, comprising introduction and expression in a plant of any nucleic acid encoding a QRR polypeptide as defined herein.

[0429] More specifically, the present invention provides a method for the production of transgenic plants having enhanced yield-related traits as defined herein which method comprises:
[0430] (i) introducing and expressing in a plant or plant cell a recombinant QRR polypeptide-encoding nucleic acid or a genetic construct comprising a QRR polypeptide-encoding nucleic acid; and
[0431] (ii) cultivating the plant cell under conditions promoting plant growth and development.

[0432] Preferably, the introduction of the QRR nucleic acid is by recombinant methods.

[0433] The recombinant nucleic acid of (i) may be any of the nucleic acids capable of encoding a QRR polypeptide as defined herein. Preferably the nucleic acid encoding the QRR polypeptide and to be introduced into the plant is an isolated nucleic acid or is comprised in a genetic construct as described above.

[0434] Cultivating the plant cell under conditions promoting plant growth and development, may or may not include regeneration and/or growth to maturity. Accordingly, in a particular embodiment of the invention, the plant cell transformed by the method according to the invention is regenerable into a transformed plant. In another particular embodiment, the plant cell transformed by the method according to the invention is not regenerable into a transformed plant, i.e. cells that are not capable to regenerate into a plant using cell culture techniques known in the art. While plants cells generally have the characteristic of totipotency, some plant cells cannot be used to regenerate or propagate intact plants from said cells. In one embodiment of the invention the plant cells of the invention are such cells. In another embodiment the plant cells of the invention are plant cells that do not sustain themselves in an autotrophic way. One example are plant cells that do not sustain themselves through photosynthesis by synthesizing carbohydrate and protein from such inorganic substances as water, carbon dioxide and mineral salt.

[0435] The nucleic acid may be introduced directly into a plant cell or into the plant itself (including introduction into a tissue, organ or any other part of a plant). According to a preferred feature of the present invention, the nucleic acid is preferably introduced into a plant or plant cell by transformation. The term “transformation” is described in more detail in the “definitions” section herein.

[0436] In one embodiment a method for the production of a transgenic sugarcane plant, a transgenic part thereof, or a transgenic plant cell thereof, having one or more enhanced yield-related traits relative to control plants, comprises the step of harvesting setts from the transgenic plant and planting the setts and growing the setts to plants, wherein the setts comprises the exogenous nucleic acid encoding the QRR polypeptide and the promoter sequence operably linked thereto.

[0437] In one embodiment the present invention extends to any plant cell or plant produced by any of the methods described herein, and to all plant parts and propagules thereof.

[0438] The present invention encompasses plants or parts thereof (including seeds) obtainable by the methods according to the present invention. The plants or plant parts or plant cells comprise a nucleic acid transgene encoding a QRR polypeptide as defined above, preferably in a genetic construct such as an expression cassette. The present invention extends further to encompass the progeny of a primary transformed or transfected cell, tissue, organ or whole plant that has been produced by any of the aforementioned methods, the only requirement being that progeny exhibit the same genotypic and/or phenotypic characteristic(s) as those produced by the parent in the methods according to the invention.

[0439] In a further embodiment the invention extends to seeds recombinantly comprising the expression cassettes of the invention, the genetic constructs of the invention, or the isolated nucleic acids encoding the QRR and/or the QRR polypeptides as described herein.

[0440] The invention also includes host cells containing an isolated nucleic acid encoding a QRR polypeptide as defined above. In one embodiment host cells according to the invention are plant cells, yeasts, bacteria or fungi. Host plants for the nucleic acids, construct, expression cassette or the vector used in the method according to the invention are, in principle, advantageously all plants which are capable of synthesizing the polypeptides used in the inventive method. In a particular embodiment the plant cells of the invention overexpress the nucleic acid molecule of the invention.

[0441] The methods of the invention are advantageously applicable to any plant, in particular to any plant as defined herein. Plants that are particularly useful in the methods of the invention include all plants which belong to the superfamily Viridiplantae, in particular monocotyledonous and dicotyledonous plants including fodder or forage legumes, ornamental plants, food crops, trees or shrubs. According to an embodiment of the present invention, the plant is a crop plant. Examples of crop plants include but are not limited to chicory, carrot, cassava, trefoil, soybean, beet, sugar beet, sunflower, canola, alfalfa, rapeseed, linseed, cotton, tomato, potato and tobacco. According to another embodiment of the present invention, the plant is a monocotyledonous plant. Examples of monocotyledonous plants include sugarcane. According to another embodiment of the present invention, the plant is a cereal. Examples of cereals include rice, maize, wheat, barley, millet, rye, triticale, sorghum, emmer, spelt, einkorn, teff, milo and oats. In a particular embodiment the plants of the invention or used in the methods of the invention are selected from the group consisting of maize, wheat, rice, soybean, cotton, oilseed rape including canola, sugarcane, sugar beet and alfalfa. Advantageously the methods of the invention are more efficient than the known methods, because the plants of the invention have increased yield and/or tolerance to an environmental stress compared to control plants used in comparable methods.

[0442] The invention also extends to harvestable parts of a plant such as, but not limited to seeds, leaves, fruits, flowers, stems, roots, rhizomes, tubers and bulbs, which harvestable parts comprise a recombinant nucleic acid encoding a QRR polypeptide. In particular, such harvestable parts are roots such as taproots, rhizomes, fruits, stems, beets, tubers, bulbs, leaves, flowers and/or seeds. In one embodiment harvestable parts are stem cuttings (like setts of sugar cane). The invention furthermore relates to products derived or produced, preferably directly derived or directly produced, from a harvestable part of such a plant, such as dry pellets, meal or powders, oil, fat and fatty acids, starch or proteins. Preferred carbohydrates are starch, cellulose or sugars, preferably sucrose. Also preferred products are residual dry fibers, e.g., of the stem (like bagasse from sugar cane after cane juice removal), molasse, or filtercake, preferably from sugar cane. In one embodiment the product comprises a recombinant nucleic acid encoding a QRR polypeptide as used and described herein and/or a recombinant QRR polypeptide for example as an indicator of the particular quality of the product.

[0443] The invention also includes methods for manufacturing a product comprising a) growing the plants of the invention under abiotic stress, particularly under nitrogen deficiency, and b) producing said product from or by the plants of the invention or parts thereof, including seeds. In a further embodiment the methods comprise the steps of a) growing the plants of the invention, b) removing the harvestable parts as described herein from the plants and c) producing said product from, or with the harvestable parts of plants according to the invention.

[0444] In one embodiment the products produced by the methods of the invention are plant products such as, but not limited to, a foodstuff, feedstuff, a food supplement, feed supplement, fiber, cosmetic or pharmaceutical. In another embodiment the methods for production are used to make agricultural products such as, but not limited to, plant extracts, proteins, amino acids, carbohydrates, fats, oils, polymers, vitamins, and the like.

[0445] In yet another embodiment the polynucleotides or the polypeptides of the invention are comprised in an agricultural product. In a particular embodiment the nucleic acid sequences and protein sequences of the invention may be used as product markers, for example where an agricultural product was produced by the methods of the invention. Such a marker can be used to identify a product to have been produced by an advantageous process resulting not only in a greater efficiency of the process but also improved quality of the product due to increased quality of the plant material and harvestable parts used in the process. Such markers can be detected by a variety of methods known in the art, for example but not limited to PCR based methods for nucleic acid detection or antibody based methods for protein detection.

[0446] The present invention also encompasses use of isolated nucleic acids encoding QRR polypeptides as described herein and use of these QRR polypeptides in enhancing any of the aforementioned yield-related traits in plants grown under abiotic stress, particularly under nitrogen deficiency, relative to control plants. For example, isolated nucleic acids encoding QRR polypeptide described herein, or the QRR polypeptides themselves, may find use in breeding programmes in which a DNA marker is identified which may be genetically linked to a QRR polypeptide-encoding gene. The nucleic acids/genes, or the QRR polypeptides themselves may be used to define a molecular marker. This DNA or protein marker may then be used in breeding programmes to select plants having enhanced yield-related traits as defined herein in the methods of the invention. Furthermore, allelic variants of a QRR polypeptide-encoding nucleic acid/gene may find use in marker-assisted breeding programmes. Isolated nucleic acids encoding QRR polypeptides may also be used as probes for genetically and physically mapping the genes that they are a part of, and as markers for traits linked to those genes. Such information may be useful in plant breeding in order to develop lines with desired phenotypes.

[0447] Moreover, the present invention relates to the following specific embodiments, wherein the expression “as defined in claim/item X” is meant to direct the artisan to apply the definition as provided in item/claim X. For example, “a nucleic acid as defined in item 1” in item X has to be understood such that the definition of the nucleic acid as described in item 1 is to be applied to the nucleic acid of item/claim X. In consequence the term “as defined in item” or “as defined in claim” may be replaced with the corresponding definition of that item or claim, respectively:

[0448] Concerning FKBP16-3
[0449] 1. A method for enhancing one or more yield-related traits in plants relative to control plants, comprising modulating expression in a plant of a nucleic acid encoding a FKBP16-3 polypeptide, wherein said FKBP16-3 polypeptide comprises an FKBP_C domain, or a FKBP_PPIASE domain, or a PEPTIDYL-PROLYL CIS-TRANS ISOMERASE domain as described above, and/or a conserved region having at at least 70%, 71%, 72%, 73%, 74%, 75%, 76%, 77%, 78%, 79%, 80%, 81%, 82%, 83%, 84%, 85%, 86%, 87%, 88%, 89%, 90%, 91%, 92%, 93%, 94%, 95%, 96%, 97%, 98%, or 99% sequence identity to the conserved region starting with amino acid A116 up to amino acid F239 in SEQ ID NO: 2.
[0450] 2. Method according to item 1, wherein said modulated expression is effected by introducing and expressing in a plant said nucleic acid encoding said FKBP16-3 polypeptide.
[0451] 3. Method according to item 1 or 2, wherein said one or more enhanced yield-related traits comprise increased yield relative to control plants, and preferably comprise increased biomass relative to control plants.
[0452] 4. Method according to any one of items 1 to 3, wherein said one or more enhanced yield-related traits are obtained under non-stress conditions.
[0453] 5. Method according to any one of items 1 to 3, wherein said one or more enhanced yield-related traits are obtained under conditions of drought stress, salt stress or nitrogen deficiency.
[0454] 6. Method according to any of items 1 to 5, wherein said FKBP16-3 polypeptide comprises one or more of motifs 1 to 3, preferably one or more of motifs 1, 4 or 3, most preferably one or more of motifs 5 to 7.
[0455] 7. Method according to any one of items 1 to 6, wherein said nucleic acid encoding an FKBP16-3 is of plant origin, preferably from a dicotyledonous plant, further preferably from the family Poaceae, more preferably from the genus Triticum, most preferably from Triticum aestivum.
[0456] 8. Method according to any one of items 1 to 7, wherein said nucleic acid encoding a FKBP16-3 encodes any one of the polypeptides listed in Table A1 or is a portion of such a nucleic acid, or a nucleic acid capable of hybridising with the complement of such a nucleic acid.
[0457] 9. Method according to any one of items 1 to 8, wherein said nucleic acid sequence encodes an orthologue or paralogue of any of the polypeptides given in Table A1.
[0458] 10. Method according to any one of items 1 to 9, wherein said nucleic acid encodes the polypeptide represented by SEQ ID NO: 2.
[0459] 11. Method according to any one of items 1 to 10, wherein said nucleic acid is operably linked to a constitutive promoter of plant origin, preferably to a medium strength constitutive promoter of plant origin, more preferably to a GOS2 promoter, most preferably to a GOS2 promoter from rice.
[0460] 12. Plant, or part thereof, or plant cell, obtainable by a method according to any one of items 1 to 11, wherein said plant, plant part or plant cell comprises a recombinant nucleic acid encoding a FKBP16-3 polypeptide as defined in any of items 1 and 6 to 10.
[0461] 13. Construct comprising:
   [0462] (i) nucleic acid encoding an FKBP16-3 as defined in any of items 1 and 6 to 10;
   [0463] (ii) one or more control sequences capable of driving expression of the nucleic acid sequence of (i); and optionally
   [0464] (iii) a transcription termination sequence.
[0465] 14. Construct according to item 13, wherein one of said control sequences is a constitutive promoter of plant origin, preferably to a medium strength constitutive promoter of plant origin, more preferably to a GOS2 promoter, most preferably to a GOS2 promoter from rice.
[0466] 15. Use of a construct according to item 13 or 14 in a method for making plants having one or more enhanced yield-related traits, preferably increased yield relative to control plants, and more preferably increased biomass relative to control plants.
[0467] 16. Plant, plant part or plant cell or a host cell transformed with a construct according to item 13 or 14.
[0468] 17. Method for the production of a transgenic plant having one or more enhanced yield-related traits relative to control plants, preferably increased yield relative to control plants, and more preferably increased biomass relative to control plants, comprising:
   [0469] (i) introducing and expressing in a plant cell or plant a nucleic acid encoding an FKBP16-3 polypeptide as defined in any of items 1 and 6 to 10; and
   [0470] (ii) cultivating said plant cell or plant under conditions promoting plant growth and development.
[0471] 18. Transgenic plant having one or more enhanced yield-related traits relative to control plants, preferably increased yield relative to control plants, and more preferably increased biomass, resulting from modulated expression of a nucleic acid encoding an FKBP16-3 polypeptide as defined in any of items 1 and 6 to 10 or a transgenic plant cell derived from said transgenic plant.
[0472] 19. Transgenic plant according to item 12, 16 or 18, or a transgenic plant cell derived therefrom, wherein said plant is a crop plant, such as beet, sugarbeet or alfalfa; or a monocotyledonous plant such as sugarcane; or a cereal, such as rice, maize, wheat, barley, millet, rye, triticale, sorghum, emmer, spelt, einkorn, teff, milo or oats.
[0473] 20. Harvestable part of a plant according to item 19, wherein said harvestable parts are preferably shoot biomass.
[0474] 21. A product derived from a plant according to item 19 and/or from harvestable parts of a plant according to item 20.
[0475] 22. Use of a nucleic acid encoding an FKBP16-3 polypeptide as defined in any of items 1 and 6 to 10 for enhancing one or more yield-related traits in plants relative to control plants, preferably for increasing yield and/or early vigour , and more preferably for increasing seed yield and/or for increasing biomass in plants relative to control plants.
[0476] 23. A method for manufacturing a product comprising the steps of growing the plants according to item 12, 16, 19 or 20 and producing said product from or by said plants; or parts thereof, including seeds.
[0477] 24. Recombinant chromosomal DNA comprising the construct according to item 9, 10 or 11
[0478] 25. Plant expression construct according to item 9, 10 or 11 or recombinant chromosomal DNA according to item 25 comprised in a host cell, preferably in a plant cell, more preferably in a crop plant cell.
[0479] 26. An isolated nucleic acid molecule selected from the group consisting of:
   [0480] (v) a nucleic acid represented by SEQ ID NO: 1;
   [0481] (vi) the complement of a nucleic acid represented by SEQ ID NO: 1;
   [0482] (vii) a nucleic acid encoding a FKBP16-3 polypeptide having in increasing order of preference at least 50%, 51%, 52%, 53%, 54%, 55%, 56%, 57%, 58%, 59%, 60%, 61%, 62%, 63%, 64%, 65%, 66%, 67%, 68%, 69%, 70%, 71%, 72%, 73%, 74%, 75%, 76%, 77%, 78%, 79%, 80%, 81%, 82%, 83%, 84%, 85%, 86%, 87%, 88%, 89%, 90%, 91%, 92%, 93%, 94%, 95%, 96%, 97%, 98%, or 99% sequence identity to the amino acid sequence represented by SEQ ID NO: 2 and additionally or alternatively comprising one or more motifs having in increasing order of preference at least 50%, 55%, 60%, 65%, 70%, 75%, 80%, 85%, 90%, 95%, 96%, 97%, 98%, 99% or more sequence identity to any one or more of the motifs given in SEQ ID NO: 301 to SEQ ID NO: 307, and further preferably conferring one or more enhanced yield-related traits relative to control plants; and
   [0483] (viii) a nucleic acid molecule which hybridizes with a nucleic acid molecule of (i) to (iii) under high stringency hybridization conditions and preferably confers one or more enhanced yield-related traits relative to control plants.
[0484] 27. An isolated polypeptide selected from the group consisting of:
   [0485] (i) an amino acid sequence represented by SEQ ID NO: 2;
   [0486] (ii) an amino acid sequence having, in increasing order of preference, at least 50%, 51%, 52%, 53%, 54%, 55%, 56%, 57%, 58%, 59%, 60%, 61%, 62%, 63%, 64%, 65%, 66%, 67%, 68%, 69%, 70%, 71%, 72%, 73%, 74%, 75%, 76%, 77%, 78%, 79%, 80%, 81%, 82%, 83%, 84%, 85%, 86%, 87%, 88%, 89%, 90%, 91%, 92%, 93%, 94%, 95%, 96%, 97%, 98%, or 99% sequence identity to the amino acid sequence represented by SEQ ID NO: 2, and additionally or alternatively comprising one or more motifs having in increasing order of preference at least 50%, 55%, 60%, 65%, 70%, 75%, 80%, 85%, 90%, 95%, 96%, 97%, 98%, 99% or more sequence identity to any one or more of the motifs given in SEQ ID NO: 301 to SEQ ID NO: 307, and further preferably conferring one or more enhanced yield-related traits relative to control plants; and
   [0487] (iii) derivatives of any of the amino acid sequences given in (i) or (ii) above.
[0488] 28. Products produced from a plant according to item 19 and/or from harvestable parts of a plant according to item 20.
[0489] 29. Construct according to items 13 or 14 comprised in a plant cell.
[0490] 30. Recombinant chromosomal DNA comprising the construct according to items 13 or 14.

[0491] Concerning QRR:
[0492] A. A method for enhancing yield-related traits in plants under abiotic stress relative to control plants, comprising modulating expression of an isolated nucleic acid encoding a quinone reductase (QRR) polypeptide in a plant, wherein said QRR polypeptide comprises InterPro domains represented by accession number IPR002085, IPRO11032, IPRO13154 and IPRO20843.
[0493] B. Method according to embodiment A, wherein said QRR polypeptide comprises one or more of the following motifs:

Motif 8 (SEQ ID NO: 681):
YAVQLAKL[AG][NG][TAL][HR]VTATCGARN
Motif 9 (SEQ ID NO: 682):
LGADE[VA][MLI]DY[KR]TP[EDQ]GA[SAKI]L[KRQ]SPS
Motif 10 (SEQ ID NO: 683):
[GA]L[KQ][HF]VE[VIL]P[VI]P[STAM][APV]KK[NDG]E
[VL]L[LI][KR][LMV][EQ]A[TA][ST][IVL]N[PQV]
[VI]DWK
Motif 11 (SEQ ID NO: 684):
[GA]L[KQ][HF]VE[VIL]P[VI]P[STAM][APV]KK[NDG]E
[VL]L[LI][KR][LMV][EQ]A[TA][ST][IVL]N[PQV]
[VI]DWK[IF]Q[KN]G[MDL][LVMA]RP[FL][LMH]P
Motif 12 (SEQ ID NO: 685):
E[VA][LM]DY[KRAN]TP[ED]G[AT][ASTRK][LM][RQT]S
[PS][SA][GS][RKT][KRE][YK]
Motif 13 (SEQ ID NO: 686):
AAS[GS][GA]VG[HLT][YF][APL]V[QH]LA[KRS][LMR]
[AG][GN][LH][HR][VIY][TR]A[TL][CR]G[AR][RN]
[NM]
Motif 14 (SEQ ID NO: 687):
[TH][CL][GR][AG][RG]N[VMA][ED]L[VL][KR][SG]LG
ADEV[LM]DY[RK]TPEGA[ST][LM][QR]SPSG[KR][KR]Y
[DN][GV]VVHC[TA][VA][GR][VIT][SG]W[SP]
Motif 15 (SEQ ID NO: 688):
[HL]VE[VL]PVP[STMA]A[KQ]KNE[VL]LLKL[EQ][AV]A
[TS][IV]NPVDWK[IVL]QKG[DML][LM][RQ]P[LFI]LPR
[RK][LF]PFIPVTD
Motif 16 (SEQ ID NO: 689):
NKADLEFLVGL[LV][KGE][EDG]G[KN][LM][KRE]T[VL]
[IV]DS[RK]F[PSL]L[SG][ED][AV][SGDA]KAW[QE]
[KST]S[IV][DE]GH[AP]TGKI[VI]VEM

[0494] C. Method according to embodiment A or B, wherein said QRR polypeptide has a quinone reducing activity.
[0495] D. Method according to any one of embodiments A to C, wherein said modulated expression is effected by introducing and expressing in a plant said nucleic acid encoding said QRR polypeptide.
[0496] E. Method according to any one of embodiments A to D, wherein said enhanced yield-related traits comprise increased yield relative to control plants, and preferably comprise increased seed yield and/or increased biomass relative to control plants.
[0497] F. Method according to any one of embodiments A to E, wherein the abiotic stress is salt stress, water stress, nitrogen deficiency, temperature stresses caused by atypical hot or cold/freezing temperatures, oxidative stress, metal stress or chemical toxicity stress.
[0498] G. Method according to any of embodiments A to F, wherein said nucleic acid encoding a QRR is of plant origin, preferably monocotyledonous plant, more preferably originated from Triticum aestivum.
[0499] H. Method according to any one of embodiments A to G, wherein said nucleic acid encoding a QRR encodes any one of the polypeptides listed in Table A2 or is a portion of such a nucleic acid, or a nucleic acid capable of hybridising with a complementary sequence of such a nucleic acid.
[0500] I. Method according to any one of embodiments A to H, wherein said nucleic acid sequence encodes an orthologue or paralogue of any of the polypeptides given in Table A2.
[0501] J. Method according to any one of embodiments A to I, wherein said polypeptide is encoded by a nucleic acid molecule comprising a nucleic acid molecule selected from the group consisting of:
   [0502] (i) an isolated nucleic acid represented by SEQ IDNO: 311;
   [0503] (ii) the complement of a nucleic acid represented by SEQ IDNO: 311;
   [0504] (iii) a nucleic acid encoding the polypeptide as represented by SEQ ID NO: 312, and further preferably confers enhanced yield-related traits relative to control plants;
   [0505] (iv) an isolated nucleic acid having, in increasing order of preference at least 30%, 31%, 32%, 33%, 34%, 35%, 36%, 37%, 38%, 39%, 40%, 41%, 42%, 43%, 44%, 45%, 46%, 47%, 48%, 49%, 50%, 51%, 52%, 53%, 54%, 55%, 56%, 57%, 58%, 59%, 60%, 61%, 62%, 63%, 64%, 65%, 66%, 67%, 68%, 69%, 70%, 71%, 72%, 73%, 74%, 75%, 76%, 77%, 78%, 79%, 80%, 81%, 82%, 83%, 84%, 85%, 86%, 87%, 88%, 89%, 90%, 91%, 92%, 93%, 94%, 95%, 96%, 97%, 98%, or 99% sequence identity with the nucleic acid sequence of SEQ IDNO: 311, and further preferably conferring enhanced yield-related traits relative to control plants;
   [0506] (v) an isolated nucleic acid molecule which hybridizes to the complement of a nucleic acid molecule of (i) to (iv) under stringent hybridization conditions and preferably confers enhanced yield-related traits relative to control plants;
   [0507] (vi) an isolated nucleic acid encoding said polypeptide having, in increasing order of preference, at least 30%, 31%, 32%, 33%, 34%, 35%, 36%, 37%, 38%, 39%, 40%, 41%, 42%, 43%, 44%, 45%, 46%, 47%, 48%, 49%, 50%, 51%, 52%, 53%, 54%, 55%, 56%, 57%, 58%, 59%, 60%, 61%, 62%, 63%, 64%, 65%, 66%, 67%, 68%, 69%, 70%, 71%, 72%, 73%, 74%, 75%, 76%, 77%, 78%, 79%, 80%, 81%, 82%, 83%, 84%, 85%, 86%, 87%, 88%, 89%, 90%, 91%, 92%, 93%, 94%, 95%, 96%, 97%, 98%, or 99% sequence identity to the amino acid sequence represented by SEQ ID NO: 312 and preferably conferring enhanced yield-related traits relative to control plants; or
   [0508] (vii) an isolated nucleic acid comprising any combination(s) of features of (i) to (vi) above.
[0509] K. Method according to any one of embodiments A to J, wherein said nucleic acid is operably linked to a constitutive promoter of plant origin, preferably to a medium strength constitutive promoter of plant origin, more preferably to a GOS2 promoter, most preferably to a GOS2 promoter from rice.
[0510] L. Plant, or part thereof, or plant cell, obtainable by a method according to any one of embodiments A to K, wherein said plant, plant part or plant cell comprises a recombinant nucleic acid encoding a QRR polypeptide as defined in any one of preceding embodiments.
[0511] M. Construct comprising:
   [0512] (i) isolated nucleic acid encoding a QRR as defined in any one of preceding embodiments;
   [0513] (ii) one or more control sequences capable of driving expression of the nucleic acid sequence of (i); and optionally
   [0514] (iii) a transcription termination sequence.
[0515] N. Construct according to embodiment M, wherein one of said control sequences is a constitutive promoter of plant origin, preferably a medium strength constitutive promoter of plant origin, more preferably a GOS2 promoter, most preferably a GOS2 promoter from rice.
[0516] O. Use of a construct according to embodiment M or N in a method for making plants having enhanced yield-related traits, preferably increased yield relative to control plants, and more preferably increased seed yield and/or increased biomass relative to control plants.
[0517] P. Plant, plant part or plant cell transformed with a construct according to embodiment M or N.
[0518] Q. Method for the production of a transgenic plant having enhanced yield-related traits compared to control plants, preferably increased yield relative to control plants, and more preferably increased seed yield and/or increased biomass relative to control plants, comprising:
   [0519] (i) introducing and expressing in a plant cell or plant an isolated nucleic acid encoding an GRP polypeptide as defined in any one of preceding embodiments; and
   [0520] (ii) cultivating said plant cell or plant under conditions promoting plant growth and development.
[0521] R. Transgenic plant having enhanced yield-related traits relative to control plants, preferably increased yield compared to control plants, and more preferably increased seed yield and/or increased biomass, resulting from modulated expression of an isolated nucleic acid encoding an GRP polypeptide as defined in any preceding embodiments or a transgenic plant cell derived from said transgenic plant.
[0522] S. Transgenic plant according to embodiment L, P or R a transgenic plant cell derived therefrom, wherein said plant is a crop plant, such as beet, sugarbeet or alfalfa; or a monocotyledonous plant such as sugarcane; or a cereal, such as rice, maize, wheat, barley, millet, rye, triticale, sorghum, emmer, spelt, einkorn, teff, milo or oats.
[0523] T. Harvestable parts of a plant according to embodiment S, wherein said harvestable parts are preferably seeds.
[0524] U. Products derived from a plant according to embodiment S and/or from harvestable parts of a plant according to claim T.
[0525] V. Use of a recombinant nucleic acid encoding a QRR polypeptide as defined in any one of preceding embodiments for enhancing yield-related traits in plants compared to control plants, preferably for increasing yield, and more preferably for increasing seed yield and/or for increasing biomass in plants relative to control plants. W. A method for manufacturing a product, comprising the steps of growing the plants according to any one of preceding embodiments and producing said product from or by said plants; or parts thereof, including seeds.
[0526] X. A method for producing a transgenic seed, comprising the steps of (i) introducing into a plant the nucleic acid encoding a QRR polypeptide as defined in any one of preceding embodiments or the construct as defined in embodiments M or N; (ii) selecting a transgenic plant having enhanced yield-related traits so produced by comparing said transgenic plant with a control plant; (iii) growing the transgenic plant to produce a transgenic seed, wherein the transgenic seed comprises the nucleic acid or the construct.
[0527] Y. A method according to embodiment X, wherein a progeny plant grown from the transgenic seed has increased expression of the polypeptide compared to the control plant.

[0528] The present invention also provides the subject matter as set forth in any one and all of items (1) to (10) below:

[0529] 1. Method for enhancing one or more yield-related traits in plants under abiotic stress relative to control plants, comprising introducing and expressing in a plant or a plant cell an isolated nucleic acid encoding a quinone reductase-related polypeptide (QRR), wherein said QRR polypeptide is represented by SEQ ID NO: 312 or a homologue thereof with at least 40% sequence identity to SEQ ID NO: 312.

[0530] 2. Construct comprising:
[0531] (i) an isolated nucleic acid encoding a QRR polypeptide as defined in item 1;
[0532] (ii) one or more control sequences capable of driving expression of the nucleic acid sequence of (i); and
[0533] (iii) a transcription termination sequence.

[0534] 3. Use of a construct as defined in item 1 in a method for making plants having one or more enhanced yield-related traits, preferably increased yield relative to control plants, and more preferably increased seed yield and/or increased biomass relative to control plants.

[0535] 4. Plant, plant part or plant cell transformed with a construct according to item 2.

[0536] 5. Transgenic plant having one or more enhanced yield-related traits relative to control plants, wherein said one or more yield-related traits comprise increased yield relative to control plants, more preferably increased seed yield and/or increased biomass, most preferably comprise one one or more of increased above ground biomass (AreaMax), increased early height of the plant (EarlyHeight), increased height of the gravity centre of the leafy biomass of the plant (GravityYMax), relative to control plants, resulting from modulated expression of an isolated nucleic acid encoding QRR polypeptide as defined in item 1 or a transgenic plant cell derived from said transgenic plant.

[0537] 6. Harvestable parts of a plant as defined in item 4 or 5, wherein said harvestable parts are preferably seeds.

[0538] 7. A product derived from a plant as defined in item 4 or 5 and/or from harvestable parts of a plant according to item 6.

[0539] 8. Use of a recombinant nucleic acid encoding QRR polypeptide as defined in any of item 1 for enhancing one or more yield-related traits in plants compared to control plants, wherein said one or more yield-related traits comprise increased yield relative to control plants, preferably increased seed yield and/or increased biomass, most preferably comprise one or more of increased above ground biomass (AreaMax), increased early height of the plant (EarlyHeight), increased height of the gravity centre of the leafy biomass of the plant (GravityYMax), relative to control plants.

[0540] 9. Method for the production of a transgenic plant having one or more enhanced yield-related traits as defined in item 5 relative to control plants, comprising:
[0541] (i) introducing and expressing in a plant cell or plant an recombinant nucleic acid encoding a QRR polypeptide as defined in item 1; and
[0542] (ii) cultivating said plant cell or plant under conditions promoting plant growth and development.

[0543] 10. A method for manufacturing a product comprising the steps of growing the plants according to any one of items 4 to 6 and producing said product from or by said plants; or parts thereof, including seeds.

### DESCRIPTION OF FIGURES

[0544] The present invention will now be described with reference to the following figures in which:

[0545] FIG. 1 represents the domain structure of FKBP16-3 represented by SEQ ID NO: 2 with conserved motifs 1 to 7.

[0546] FIG. 2 represents a multiple alignment of various FKBP16-3 polypeptides. The sequence identifiers correspond to those of Table A1. The asterisks indicate identical amino acids among the various protein sequences, colons represent highly conserved amino acid substitutions, and the dots represent less conserved amino acid substitution; on other positions there is no sequence conservation. These alignments can be used for defining further motifs or signature sequences, when using conserved amino acids.

[0547] FIG. 3 shows the MATGAT table of Example 3.

[0548] FIG. 4 represents the binary vector used for increased expression in Oryza sativa of a FKBP16-3-encoding nucleic acid under the control of a rice GOS2 promoter (pGOS2).

[0549] FIG. 5 represents the domain structure of QRR represented by SEQ ID NO: 312 with conserved motifs 8 to 16 as described herein.

[0550] FIG. 6 represents a multiple alignment of various QRR polypeptides. The asterisks indicate identical amino acids among the various protein sequences, colons represent highly conserved amino acid substitutions, and the dots represent less conserved amino acid substitution; on other positions there is no sequence conservation. These alignments can be used for defining further motifs or signature sequences, when using conserved amino acids.

[0551] FIG. 7 shows the MATGAT table of Example 13.

[0552] FIG. 8 represents the binary vector used for increased expression in Oryza sativa of a QRR-encoding nucleic acid under the control of a rice GOS2 promoter (pGOS2).

### EXAMPLES

[0553] The present invention will now be described with reference to the following examples, which are by way of illustration only. The following examples are not intended to limit the scope of the invention. Unless otherwise indicated, the present invention employs conventional techniques and methods of plant biology, molecular biology, bioinformatics and plant breedings.

[0554] DNA manipulation: unless otherwise stated, recombinant DNA techniques are performed according to standard protocols described in (Sambrook (2001) Molecular Cloning: a laboratory manual, 3rd Edition Cold Spring Harbor Laboratory Press, CSH, N.Y.) or in Volumes 1 and 2 of Ausubel et al. (1994), Current Protocols in Molecular Biology, Current Protocols. Standard materials and methods for plant molecular work are described in Plant Molecular Biology Labfax (1993) by R. D. D. Croy, published by BIOS Scientific Publications Ltd (UK) and Blackwell Scientific Publications (UK).

### Example 1

### Identification of Sequences Related to SEQ ID NO: 1 and SEQ ID NO: 2

[0555] Sequences (full length cDNA, ESTs or genomic) related to SEQ ID NO: 1 and SEQ ID NO: 2 were identified amongst those maintained in the Entrez Nucleotides database at the National Center for Biotechnology Information (NCBI) using database sequence search tools, such as the Basic Local Alignment Tool (BLAST) (Altschul et al. (1990) J. Mol. Biol. 215:403-410; and Altschul et al. (1997) Nucleic Acids Res. 25:3389-3402). The program is used to find regions of local similarity between sequences by comparing nucleic acid or polypeptide sequences to sequence databases and by calculating the statistical significance of matches. For example, the polypeptide encoded by the nucleic acid of SEQ ID NO: 1 was used for the TBLASTN algorithm, with default settings and the filter to ignore low complexity sequences set off. The output of the analysis was viewed by pairwise comparison, and ranked according to the probability score (E-value), where the score reflect the probability that a particular alignment occurs by chance (the lower the E-value, the more significant the hit). In addition to E-values, comparisons were also scored by percentage identity. Percentage identity refers to the number of identical nucleotides (or amino acids) between the two compared nucleic acid (or polypeptide) sequences over a particular length. In some instances, the default parameters may be adjusted to modify the stringency of the search. For example the E-value may be increased to show less stringent matches. This way, short nearly exact matches may be identified.

[0556] Table A1 provides a list of nucleic acid sequences related to SEQ ID NO: 1 and SEQ ID NO: 2.

TABLE A1
Examples of FKBP16-3 nucleic acids and polypeptides:

| | Nucleic acid | Polypeptide |
|---|---|---|
| Name | SEQ ID NO: | SEQ ID NO: |
| Ta_FKBP | 1 | 2 |
| Sc_FKBP4 | 3 | 4 |
| Nt_FBPK | 5 | 6 |
| Ta_FKBP15 | 7 | 8 |
| At_FKBP17-2 | 9 | 10 |
| At_FKBP18 | 11 | 12 |
| At_FKBP17-3 | 13 | 14 |
| At_FKBP16-3 | 15 | 16 |
| At_FKBP16-4 | 17 | 18 |
| At_FKBP43 | 19 | 20 |
| At_FKBP42 | 21 | 22 |
| At_FKBP15-1 | 23 | 24 |
| At_FKBP62 | 25 | 26 |
| At_FKBP72 | 27 | 28 |
| At_FKBP72-2yh | 29 | 30 |
| At_FKBP20-1 | 31 | 32 |
| At_FKBP20-2 | 33 | 34 |
| At_FKBP17-1 | 35 | 36 |
| At_FKBP53 | 37 | 38 |
| At_FKBP16-1 | 39 | 40 |
| At_FKBP16-2 | 41 | 42 |
| At_FKBP15-3 | 43 | 44 |
| At_FKBP19 | 45 | 46 |
| At_FKBP13 | 47 | 48 |
| At_FKBP65 | 49 | 50 |
| At_FKBP15-2 | 51 | 52 |
| At_TIG | 53 | 54 |
| At_FKBP12 | 55 | 56 |
| Os_FKBP57 | 57 | 58 |
| Os_FKBP73 | 59 | 60 |
| Os_FKBP46 | 61 | 62 |
| Os_FKBP20-1b | 63 | 64 |
| Os_FKBP15-1 | 65 | 66 |
| Os_FKBP18 | 67 | 68 |
| Os_FKBP17-1 | 69 | 70 |
| Os_FKBP16-1 | 71 | 72 |
| Os_FKBP75 | 73 | 74 |
| Os_FKBP16-2 | 75 | 76 |
| Os_FKBP12 | 77 | 78 |
| Os_FKBP72 | 79 | 80 |
| Os_FKBP17-2 | 81 | 82 |
| Os_FKBP65 | 83 | 84 |
| Os_FKBP53a | 85 | 86 |
| Os_FKBP20-1a | 87 | 88 |
| Os_TIG | 89 | 90 |
| Os_FKBP13 | 91 | 92 |
| Os_FKBP19 | 93 | 94 |
| Os_FKBP16-4 | 95 | 96 |
| Os_FKBP20-2 | 97 | 98 |
| Os_FKBP64 | 99 | 100 |
| Os_FKBP16-3 | 101 | 102 |
| Os_FKBP59 | 103 | 104 |
| Os_FKBP44 | 105 | 106 |
| Os_FKBP53b | 107 | 108 |
| Os_FKBP15-2 | 109 | 110 |
| Os_FKBP42b | 111 | 112 |
| Os_FKBP42a | 113 | 114 |
| Pt_FKBP12 | 115 | 116 |
| Pt_FKBP15 | 117 | 118 |
| Pt_FKBP16-2a | 119 | 120 |
| Pt_FKBP16-2b | 121 | 122 |
| Pt_FKBP17 | 123 | 124 |
| Pt_FKBP19 | 125 | 126 |
| Pt_FKBP20 | 127 | 128 |
| Pt_FKBP20-1a | 129 | 130 |
| Pt_FKBP20-1b | 131 | 132 |
| Pt_FKBP23-1 | 133 | 134 |
| Pt_FKBP23-2 | 135 | 136 |
| Pt_FKBP25-1 | 137 | 138 |
| Pt_FKBP25-2 | 139 | 140 |
| Pt_FKBP25-3 | 141 | 142 |
| Pt_FKBP26-1 | 143 | 144 |
| Pt_FKBP26-2 | 145 | 146 |
| Pt_FKBP27-1 | 147 | 148 |
| Pt_FKBP27-2 | 149 | 150 |
| Pt_FKBP28 | 151 | 152 |
| Pt_FKBP29 | 153 | 154 |
| Pt_FKBP32 | 155 | 156 |
| Pt_FKBP38 | 157 | 158 |
| Pt_FKBP42-1 | 159 | 160 |
| Pt_FKBP42-2 | 161 | 162 |
| Pt_FKBP43 | 163 | 164 |
| Pt_FKBP53 | 165 | 166 |
| Pt_FKBP62-1 | 167 | 168 |
| Pt_FKBP62-2 | 169 | 170 |
| Pt_FKBP65-1 | 171 | 172 |
| Pt_FKBP65-2 | 173 | 174 |
| Pt_FKBP65-3 | 175 | 176 |
| Zm_FKBP16-4 | 177 | 178 |
| Zm_FKBP22 | 179 | 180 |
| Zm_FKBP12a | 181 | 182 |
| Zm_FKBP12b | 183 | 184 |
| Zm_FKBP53 | 185 | 186 |
| Zm_FKBP16-3 | 187 | 188 |
| Zm_FKBP15-1b | 189 | 190 |
| Zm_FKBP16-2a | 191 | 192 |
| Zm_FKBP16-2b | 193 | 194 |
| Zm_FKBP21 | 195 | 196 |
| Zm_FKBP20 | 197 | 198 |
| Zm_FKBP17-1 | 199 | 200 |
| Zm_FKBP17-2a | 201 | 202 |
| Zm_FKBP17-2b | 203 | 204 |
| Zm_FKBP13 | 205 | 206 |
| Zm_FKBP64b | 207 | 208 |
| Zm_FKBP64a | 209 | 210 |
| Zm_FKBP62 | 211 | 212 |
| Zm_FKBP16-1 | 213 | 214 |
| Zm_FKBP27 | 215 | 216 |
| Zm_FKBP15-2a | 217 | 218 |
| Zm_FKBP15-2b | 219 | 220 |
| Zm_FKBP72 | 221 | 222 |
| Zm_FKBP42 | 223 | 224 |
| Zm_FKBP18 | 225 | 226 |
| Zm_FKBP15-1a | 227 | 228 |
| Zm_FKBP65 | 229 | 230 |
| Zm_FKBP19 | 231 | 232 |
| Zm_FKBP75 | 233 | 234 |
| Zm_FKBP49 | 235 | 236 |
| Hy_FKBP16-3 | 237 | 238 |
| Sb_FKBP16-3 | 239 | 240 |
| Bd_FKBP16-3 | 241 | 242 |
| C.reinardtii_FKB16-3 | 243 | 244 |
| V.carteri_FBKP16-3 | 245 | 246 |
| A.majus_FKBP16-3 | 247 | 248 |
| A.formosa_FKBP16-3 | 249 | 250 |
| A.hypogaea_FKBP16-3 | 251 | 252 |
| B.spinosa_FKBP16-3 | 253 | 254 |
| B.napus_FKBP16-3 | 255 | 256 |
| B.rapa_FKBP16-3 | 257 | 258 |
| C.annuum_FKBP16-3 | 259 | 260 |
| C.solstitialis_FKBP16-3 | 261 | 262 |
| C.melo_FKBP16-3 | 263 | 264 |
| G.max_FKBP16-3 | 265 | 266 |
| G.hirsutum_FKBP16-3 | 267 | 268 |
| G.abyssinica_FKBP16-3 | 269 | 270 |
| H.annuus_FKBP16-3 | 271 | 272 |
| H.exilis_FKBP16-3 | 273 | 274 |
| H.tuberosus_FKBP16-3 | 275 | 276 |
| L.cinereus_FKBP16-3 | 277 | 278 |
| S.lycopersicum_FKBP16-3 | 279 | 280 |
| M.domestica_FKBP16-3 | 281 | 282 |
| M.truncatula_FKBP16-3 | 283 | 284 |
| M.guttatus_FKBP16-3 | 285 | 286 |
| P.edulis_FKBP16-3 | 287 | 288 |
| P.patens_FKBP16-3 | 289 | 290 |
| P.glauca_FKBP16-3 | 291 | 292 |
| R.raphanistrum_FKBP16-3 | 293 | 294 |
| S.moellendorffii_FKBP16-3 | 295 | 296 |
| T.pratense_FKBP16-3 | 297 | 298 |
| T.pusilla_FKBP16-3 | 299 | 300 |

[0557] Sequences have been tentatively assembled and publicly disclosed by research institutions, such as The Institute for Genomic Research (TIGR; beginning with TA). For instance, the Eukaryotic Gene Orthologs (EGO) database may be used to identify such related sequences, either by keyword search or by using the BLAST algorithm with the nucleic acid sequence or polypeptide sequence of interest. Special nucleic acid sequence databases have been created for particular organisms, e.g. for certain prokaryotic organisms, such as by the Joint Genome Institute. Furthermore, access to proprietary databases, has allowed the identification of novel nucleic acid and polypeptide sequences.

### Example 2

### Alignment of FKBP16-3 Polypeptide Sequences

[0558] Alignment of the polypeptide sequences was performed using the ClustalW 2.0 algorithm of progressive alignment (Thompson et al. (1997) Nucleic Acids Res 25:4876-4882; Chenna et al. (2003). Nucleic Acids Res 31:3497-3500) with standard setting (slow alignment, similarity matrix: Gonnet, gap opening penalty 10, gap extension penalty: 0.2). Minor manual editing was done to further optimise the alignment. The FKBP16-3 polypeptides are aligned in FIG. 2.

### Example 3

### Calculation of Global Percentage Identity Between Polypeptide Sequences

[0559] Global percentages of similarity and identity between full length polypeptide sequences useful in performing the methods of the invention were determined using MatGAT (Matrix Global Alignment Tool) software (BMC Bioinformatics. 2003 4:29. MatGAT: an application that generates similarity/identity matrices using protein or DNA sequences. Campanella J J, Bitincka L, Smalley J; software hosted by Ledion Bitincka). MatGAT generates similarity/identity matrices for DNA or protein sequences without needing pre-alignment of the data. The program performs a series of pair-wise alignments using the Myers and Miller global alignment algorithm, calculates similarity and identity, and then places the results in a distance matrix.

[0560] Results of the MatGAT analysis for the angiosperm FKBP16-3 sequences are shown in FIG. 3 with global similarity and identity percentages over the full length of the polypeptide sequences. Sequence similarity is shown in the bottom half of the dividing line and sequence identity is shown in the top half of the diagonal dividing line. Parameters used in the analysis were: Scoring matrix: Blosum62, First Gap: 12, Extending Gap: 2. The sequence identity (in %) between the FKBP16-3 polypeptide sequences useful in performing the methods of the invention can be as low as 50% compared to SEQ ID NO: 2(Ta_FKBP).

[0561] Like for full length sequences, a MATGAT table based on subsequences of a specific domain, may be generated. Based on a multiple alignment of FKBP16-3 polypeptides, such as for example the one of Example 2, a skilled person may select conserved sequences and submit as input for a MaTGAT analysis. This approach is useful where overall sequence conservation among FKBP16-3 proteins is rather low.

### Example 4

### Identification if Domains Comprised in Polypeptide Sequences Useful in Performing the Methods of the Invention

[0562] The Integrated Resource of Protein Families, Domains and Sites (InterPro) database is an integrated interface for the commonly used signature databases for text-and sequence-based searches. The InterPro database combines these databases, which use different methodologies and varying degrees of biological information about well-characterized proteins to derive protein signatures. Collaborating databases include SWISS-PROT, PROSITE, TrEMBL, PRINTS, ProDom and Pfam, Smart and TIGRFAMs. Pfam is a large collection of multiple sequence alignments and hidden Markov models covering many common protein domains and families. Pfam is hosted at the Sanger Institute server in the United Kingdom. Interpro is hosted at the European Bioinformatics Institute in the United Kingdom.

[0563] The results of the InterPro scan (see Zdobnov E. M. and Apweiler R.; “InterProScan-an integration platform for the signature-recognition methods in InterPro.”; Bioinformatics, 2001, 17(9): 847-8; InterPro database, release 40.0) of the polypeptide sequence as represented by SEQ ID NO: 2 are presented in Table B.

TABLE B
InterPro scan results (major accession numbers) of the polypeptide sequence as represented by SEQ ID NO: 2.

| | | |
|---|---|---|
| InterPro | IPR001179 | Peptidyl-prolyl cis-trans isomerase, FKBP-type, domain |

Biological Process: protein folding (GO: 0006457)

| method | AccNumber | shortName | location |
|---|---|---|---|
| HMMPfam | PF00254 | FKBP_C | T[149-238] 1.3e−17 |
| ProfileScan | PS50059 | FKBP_PPIASE | T[149-241] 19.326 |
| InterPro | IPR023566 | Peptidyl-prolyl cis-trans isomerase, FKBP-type | |
| method | AccNumber | shortName | location |
| HMMPanther | PTHR10516 | PEPTIDYL-PROLYL CIS-TRANS ISOMERASE | T[247] 7e−103 |
| InterPro | NULL | NULL | |
| method | AccNumber | shortName | location |
| Gene3D | G3DSA: 3.10.50.40 | no description | T[111-238] 3e−30 |
| HMMPanther | PTHR10516: SF176 | SUBFAMILY NOT NAMED | T[22-247] 7e−103 |
| superfamily | SSF54534 | FKBP-like | T[114-240] 2.9e−28 |

[0564] In one embodiment a FKBP16-3 polypeptide comprises a conserved domain (or motif) with at least 70%, 71%, 72%, 73%, 74%, 75%, 76%, 77%, 78%, 79%, 80%, 81%, 82%, 83%, 84%, 85%, 86%, 87%, 88%, 89%, 90%, 91%, 92%, 93%, 94%, 95%, 96%, 97%, 98%, or 99% sequence identity to a conserved domain from amino acid 149 to 238 in SEQ ID NO: 2).

### Example 5

### Topology Prediction of the Fkbp16-3 Polypeptide Sequences

[0565] TargetP 1.1 predicts the subcellular location of eukaryotic proteins. The location assignment is based on the predicted presence of any of the N-terminal pre-sequences: chloroplast transit peptide (cTP), mitochondrial targeting peptide (mTP) or secretory pathway signal peptide (SP). Scores on which the final prediction is based are not really probabilities, and they do not necessarily add to one. However, the location with the highest score is the most likely according to TargetP, and the relationship between the scores (the reliability class) may be an indication of how certain the prediction is. The reliability class (RC) ranges from 1 to 5, where 1 indicates the strongest prediction. For the sequences predicted to contain an N-terminal presequence a potential cleavage site can also be predicted. TargetP is maintained at the server of the Technical University of Denmark (Emanuelsson et al., Nature Protocols 2, 953-971 (2007)).

[0566] A number of parameters must be selected before analysing a sequence, such as organism group (non-plant or plant), cutoff sets (none, predefined set of cutoffs, or user-specified set of cutoffs), and the calculation of prediction of cleavage sites (yes or no).

[0567] The results of TargetP 1.1 analysis of the polypeptide sequence as represented by SEQ ID NO: 2 are presented Table C. The “plant” organism group has been selected, no cutoffs defined, and the predicted length of the transit peptide requested. The polypeptide sequence as represented by SEQ ID NO: 2 is predicted to be located in the chloroplast.

TABLE C1
TargetP 1.1 analysis of the polypeptide sequence as represented by
SEQ ID NO: 2.

| Name | Len | cTP | mTP | SP | other | Loc | RC | TPlen |
|---|---|---|---|---|---|---|---|---|
| Ta_FKBP | 247 | 0.641 | 0.322 | 0.016 | 0.028 | C | 4 | 79 |
| cutoff | | 0.000 | 0.000 | 0.000 | 0.000 | | | |

Abbreviations:
Len, Length;
cTP, Chloroplastic transit peptide;
mTP, Mitochondrial transit peptide,
SP, Secretory pathway signal peptide,
other, Other subcellular targeting,
Loc, Predicted Location;
RC, Reliability class;
TPlen, Predicted transit peptide length.

[0568] Many other algorithms can be used to perform such analyses, including:

[0569] ChloroP 1.1 hosted on the server of the Technical University of Denmark;

[0570] Protein Prowler Subcellular Localisation Predictor version 1.2 hosted on the server of the Institute for Molecular Bioscience, University of Queensland, Brisbane, Australia;

[0571] PENCE Proteome Analyst PA-GOSUB 2.5 hosted on the server of the University of Alberta, Edmonton, Alberta, Canada;

[0572] TMHMM, hosted on the server of the Technical University of Denmark

[0573] PSORT (URL: psort.org)

[0574] PLOC (Park and Kanehisa, Bioinformatics, 19, 1656-1663, 2003).

[0575] Results from some of these predictions are provided in Table C2 hereunder:

TABLE C2

| | |
|---|---|
| Psort | chloroplast thylakoid 0.782 |
| Plant-mPLOC (v2.0) | Chloroplastic |
| WOLF PSORT | |
| TargetP (1.1) | Chloroplastic 0.641 quality 4 |
| ChloroP | Chloroplastic 0.563 |
| SignalP4 | No signal peptide |
| Mitopred | |
| MitoProtll | Mitochondrial 0.8164 |
| Sosui | |
| Phobius | Non-cytoplasmic, with signal peptide 1-23 |
| SubLoc v1.0 | |

### Example 6

### Cloning of the FKBP16-3 Encoding Nucleic Acid Sequence

[0576] The nucleic acid sequence was amplified by PCR using as template a custom-made Triticum aestivum seedlings cDNA library. PCR was performed using a commercially available proofreading Taq DNA polymerase in standard conditions, using 200 ng of template in a 50 μl PCR mix. The primers used were prm24406 (SEQ ID NO: 308; sense, start codon in bold): 5′-ggggacaagtttgtacaaaaaagcaggcttaaacaatggctgctgctgcc-3′ and prm24407 (SEQ ID NO: 309; reverse, complementary): 5′-ggggaccactttgtacaagaaagctgggtga tgatgctttcactcatcgtcg-3′, which include the AttB sites for Gateway recombination. The amplified PCR fragment was purified also using standard methods. The first step of the Gateway procedure, the BP reaction, was then performed, during which the PCR fragment recombined in vivo with the pDONR201 plasmid to produce, according to the Gateway terminology, an “entry clone”, pFKBP16-3. Plasmid pDONR201 was purchased from Invitrogen as part of the Gateway® technology.

[0577] The entry clone comprising SEQ ID NO: 1 was then used in an LR reaction with a destination vector used for Oryza sativa transformation. This vector contained as functional elements within the T-DNA borders: a plant selectable marker; a screenable marker expression cassette; and a Gateway cassette intended for LR in vivo recombination with the nucleic acid sequence of interest already cloned in the entry clone. A rice GOS2 promoter (SEQ ID NO: 310) for constitutive expression was located upstream of this Gateway cassette.

[0578] After the LR recombination step, the resulting expression vector pGOS2:FKBP16-3 (FIG. 5) was transformed into Agrobacterium strain LBA4044 according to methods well known in the art.

### Example 7

### Plant Transformation

[0579] Rice Transformation

[0580] The Agrobacterium containing the expression vector was used to transform Oryza sativa plants. Mature dry seeds of the rice japonica cultivar Nipponbare were dehusked. Sterilization was carried out by incubating for one minute in 70% ethanol, followed by 30 to 60 minutes, preferably 30 minutes in sodium hypochlorite solution (depending on the grade of contamination), followed by a 3 to 6 times, preferably 4 time wash with sterile distilled water. The sterile seeds were then germinated on a medium containing 2,4-D (callus induction medium). After incubation in light for 6 days scutellum-derived calli is transformed with Agrobacterium as described herein below.

[0581] Agrobacterium strain LBA4404 containing the expression vector was used for co-cultivation. Agrobacterium was inoculated on AB medium with the appropriate antibiotics and cultured for 3 days at 28° C. The bacteria were then collected and suspended in liquid co-cultivation medium to a density (OD600) of about 1. The calli were immersed in the suspension for 1 to 15 minutes. The callus tissues were then blotted dry on a filter paper and transferred to solidified, co-cultivation medium and incubated for 3 days in the dark at 25° C. After washing away the Agrobacterium, the calli were grown on 2,4-D-containing medium for 10 to 14 days (growth time for indica: 3 weeks) under light at 28° C.-32° C. in the presence of a selection agent. During this period, rapidly growing resistant callus developed. After transfer of this material to regeneration media, the embryogenic potential was released and shoots developed in the next four to six weeks. Shoots were excised from the calli and incubated for 2 to 3 weeks on an auxin-containing medium from which they were transferred to soil. Hardened shoots were grown under high humidity and short days in a greenhouse.

[0582] Transformation of rice cultivar indica can also be done in a similar way as give above according to techniques well known to a skilled person.

[0583] 35 to 90 independent T0 rice transformants were generated for one construct. The primary transformants were transferred from a tissue culture chamber to a greenhouse. After a quantitative PCR analysis to verify copy number of the T-DNA insert, only single copy transgenic plants that exhibit tolerance to the selection agent were kept for harvest of T1 seed. Seeds were then harvested three to five months after transplanting. The method yielded single locus transformants at a rate of over 50% (Aldemita and Hodges1996, Chan et al. 1993, Hiei et al. 1994).

### Example 8

### Transformation of Other Crops

[0584] Corn Transformation

[0585] Transformation of maize (Zea mays) is performed with a modification of the method described by Ishida et al. (1996) Nature Biotech 14(6): 745-50. Transformation is genotype-dependent in corn and only specific genotypes are amenable to transformation and regeneration. The inbred line A188 (University of Minn.) or hybrids with A188 as a parent are good sources of donor material for transformation, but other genotypes can be used successfully as well. Ears are harvested from corn plant approximately 11 days after pollination (DAP) when the length of the immature embryo is about 1 to 1.2 mm. Immature embryos are cocultivated with Agrobacterium tumefaciens containing the expression vector, and transgenic plants are recovered through organogenesis. Excised embryos are grown on callus induction medium, then maize regeneration medium, containing the selection agent (for example imidazolinone but various selection markers can be used). The Petri plates are incubated in the light at 25° C. for 2-3 weeks, or until shoots develop. The green shoots are transferred from each embryo to maize rooting medium and incubated at 25° C. for 2-3 weeks, until roots develop. The rooted shoots are transplanted to soil in the greenhouse. T1 seeds are produced from plants that exhibit tolerance to the selection agent and that contain a single copy of the T-DNA insert.

[0586] Wheat Transformation

[0587] Transformation of wheat is performed with the method described by Ishida et al. (1996) Nature Biotech 14(6): 745-50. The cultivar Bobwhite (available from CIMMYT, Mexico) is commonly used in transformation. Immature embryos are co-cultivated with Agrobacterium tumefaciens containing the expression vector, and transgenic plants are recovered through organogenesis. After incubation with Agrobacterium, the embryos are grown in vitro on callus induction medium, then regeneration medium, containing the selection agent (for example imidazolinone but various selection markers can be used). The Petri plates are incubated in the light at 25° C. for 2-3 weeks, or until shoots develop. The green shoots are transferred from each embryo to rooting medium and incubated at 25° C. for 2-3 weeks, until roots develop. The rooted shoots are transplanted to soil in the greenhouse. T1 seeds are produced from plants that exhibit tolerance to the selection agent and that contain a single copy of the T-DNA insert.

[0588] Soybean Transformation

[0589] Soybean is transformed according to a modification of the method described in the Texas A&M patent U.S. Pat. No. 5,164,310. Several commercial soybean varieties are amenable to transformation by this method. The cultivar Jack (available from the Ill. Seed foundation) is commonly used for transformation. Soybean seeds are sterilised for in vitro sowing. The hypocotyl, the radicle and one cotyledon are excised from seven-day old young seedlings. The epicotyl and the remaining cotyledon are further grown to develop axillary nodes. These axillary nodes are excised and incubated with Agrobacterium tumefaciens containing the expression vector. After the cocultivation treatment, the explants are washed and transferred to selection media. Regenerated shoots are excised and placed on a shoot elongation medium. Shoots no longer than 1 cm are placed on rooting medium until roots develop. The rooted shoots are transplanted to soil in the greenhouse. T1 seeds are produced from plants that exhibit tolerance to the selection agent and that contain a single copy of the T-DNA insert.

[0590] Rapeseed/Canola Transformation

[0591] Cotyledonary petioles and hypocotyls of 5-6 day old young seedling are used as explants for tissue culture and transformed according to Babic et al. (1998, Plant Cell Rep 17: 183-188). The commercial cultivar Westar (Agriculture Canada) is the standard variety used for transformation, but other varieties can also be used. Canola seeds are surface-sterilized for in vitro sowing. The cotyledon petiole explants with the cotyledon attached are excised from the in vitro seedlings, and inoculated with Agrobacterium (containing the expression vector) by dipping the cut end of the petiole explant into the bacterial suspension. The explants are then cultured for 2 days on MSBAP-3 medium containing 3 mg/I BAP, 3% sucrose, 0.7% Phytagar at 23° C., 16 hr light. After two days of co-cultivation with Agrobacterium, the petiole explants are transferred to MSBAP-3 medium containing 3 mg/l BAP, cefotaxime, carbenicillin, or timentin (300 mg/l) for 7 days, and then cultured on MSBAP-3 medium with cefotaxime, carbenicillin, or timentin and selection agent until shoot regeneration. When the shoots are 5-10 mm in length, they are cut and transferred to shoot elongation medium (MSBAP-0.5, containing 0.5 mg/l BAP). Shoots of about 2 cm in length are transferred to the rooting medium (MSO) for root induction. The rooted shoots are transplanted to soil in the greenhouse. T1 seeds are produced from plants that exhibit tolerance to the selection agent and that contain a single copy of the T-DNA insert.

[0592] Alfalfa Transformation

[0593] A regenerating clone of alfalfa (Medicago sativa) is transformed using the method of (McKersie et al., 1999 Plant Physiol 119: 839-847). Regeneration and transformation of alfalfa is genotype dependent and therefore a regenerating plant is required. Methods to obtain regenerating plants have been described. For example, these can be selected from the cultivar Rangelander (Agriculture Canada) or any other commercial alfalfa variety as described by Brown D C W and A Atanassov (1985. Plant Cell Tissue Organ Culture 4: 111-112). Alternatively, the RA3 variety (University of Wis.) has been selected for use in tissue culture (Walker et al., 1978 Am J Bot 65:654-659). Petiole explants are cocultivated with an overnight culture of Agrobacterium tumefaciens C58C1 pMP90 (McKersie et al., 1999 Plant Physiol 119: 839-847) or LBA4404 containing the expression vector. The explants are cocultivated for 3 d in the dark on SH induction medium containing 288 mg/L Pro, 53 mg/L thioproline, 4.35 g/L K2SO4, and 100 μm acetosyringinone. The explants are washed in half-strength Murashige-Skoog medium (Murashige and Skoog, 1962) and plated on the same SH induction medium without acetosyringinone but with a suitable selection agent and suitable antibiotic to inhibit Agrobacterium growth. After several weeks, somatic embryos are transferred to BOi2Y development medium containing no growth regulators, no antibiotics, and 50 g/L sucrose. Somatic embryos are subsequently germinated on half-strength Murashige-Skoog medium. Rooted seedlings were transplanted into pots and grown in a greenhouse. T1 seeds are produced from plants that exhibit tolerance to the selection agent and that contain a single copy of the T-DNA insert.

[0594] Cotton Transformation

[0595] Cotton is transformed using Agrobacterium tumefaciens according to the method described in U.S. Pat. No. 5,159,135. Cotton seeds are surface sterilised in 3% sodium hypochlorite solution during 20 minutes and washed in distilled water with 500 μg/ml cefotaxime. The seeds are then transferred to SH-medium with 50μg/ml benomyl for germination. Hypocotyls of 4 to 6 days old seedlings are removed, cut into 0.5 cm pieces and are placed on 0.8% agar. An Agrobacterium suspension (approx. 108 cells per ml, diluted from an overnight culture transformed with the gene of interest and suitable selection markers) is used for inoculation of the hypocotyl explants. After 3 days at room temperature and lighting, the tissues are transferred to a solid medium (1.6 g/l Gelrite) with Murashige and Skoog salts with B5 vitamins (Gamborg et al., Exp. Cell Res. 50:151-158 (1968)), 0.1 mg/l 2,4-D, 0.1 mg/l 6-furfurylaminopurine and 750 μg/ml MgCL2, and with 50 to 100 μg/ml cefotaxime and 400-500 μg/ml carbenicillin to kill residual bacteria. Individual cell lines are isolated after two to three months (with subcultures every four to six weeks) and are further cultivated on selective medium for tissue amplification (30° C., 16 hr photoperiod). Transformed tissues are subsequently further cultivated on non-selective medium during 2 to 3 months to give rise to somatic embryos. Healthy looking embryos of at least 4 mm length are transferred to tubes with SH medium in fine vermiculite, supplemented with 0.1 mg/l indole acetic acid, 6 furfurylaminopurine and gibberellic acid. The embryos are cultivated at 30° C. with a photoperiod of 16 hrs, and plantlets at the 2 to 3 leaf stage are transferred to pots with vermiculite and nutrients. The plants are hardened and subsequently moved to the greenhouse for further cultivation.

[0596] Sugarbeet Transformation

[0597] Seeds of sugarbeet (Beta vulgaris L.) are sterilized in 70% ethanol for one minute followed by 20 min. shaking in 20% Hypochlorite bleach e.g. Clorox® regular bleach (commercially available from Clorox, 1221 Broadway, Oakland, Calif. 94612, USA). Seeds are rinsed with sterile water and air dried followed by plating onto germinating medium (Murashige and Skoog (MS) based medium (Murashige, T., and Skoog, ., 1962. Physiol. Plant, vol. 15, 473-497) including B5 vitamins (Gamborg et al.; Exp. Cell Res., vol. 50, 151-8.) supplemented with 10 g/l sucrose and 0,8% agar). Hypocotyl tissue is used essentially for the initiation of shoot cultures according to Hussey and Hepher (Hussey, G., and Hepher, A., 1978. Annals of Botany, 42, 477-9) and are maintained on MS based medium supplemented with 30g/l sucrose plus 0.25mg/l benzylamino purine and 0.75% agar, pH 5.8 at 23-25° C. with a 16-hour photoperiod. Agrobacterium tumefaciens strain carrying a binary plasmid harbouring a selectable marker gene, for example nptll, is used in transformation experiments. One day before transformation, a liquid LB culture including antibiotics is grown on a shaker (28° C., 150 rpm) until an optical density (O. D.) at 600 nm of ˜1 is reached. Overnight-grown bacterial cultures are centrifuged and resuspended in inoculation medium (O.D. ˜1) including Acetosyringone, pH 5.5. Shoot base tissue is cut into slices (1.0 cm×1.0 cm×2.0 mm approximately). Tissue is immersed for 30 s in liquid bacterial inoculation medium. Excess liquid is removed by filter paper blotting. Co-cultivation occurred for 24-72 hours on MS based medium incl. 30 g/l sucrose followed by a non-selective period including MS based medium, 30 g/l sucrose with 1 mg/l BAP to induce shoot development and cefotaxim for eliminating the Agrobacterium. After 3-10 days explants are transferred to similar selective medium harbouring for example kanamycin or G418 (50-100 mg/l genotype dependent). Tissues are transferred to fresh medium every 2-3 weeks to maintain selection pressure. The very rapid initiation of shoots (after 3-4 days) indicates regeneration of existing meristems rather than organogenesis of newly developed transgenic meristems. Small shoots are transferred after several rounds of subculture to root induction medium containing 5 mg/l NAA and kanamycin or G418. Additional steps are taken to reduce the potential of generating transformed plants that are chimeric (partially transgenic). Tissue samples from regenerated shoots are used for DNA analysis. Other transformation methods for sugarbeet are known in the art, for example those by Linsey & Gallois (Linsey, K., and Gallois, P., 1990. Journal of Experimental Botany; vol. 41, No. 226; 529-36) or the methods published in the international application published as WO9623891A.

[0598] Sugarcane Transformation

[0599] Spindles are isolated from 6-month-old field grown sugarcane plants (Arencibia et al., 1998. Transgenic Research, vol. 7, 213-22; Enriquez-Obregon et al., 1998. Planta, vol. 206, 20-27). Material is sterilized by immersion in a 20% Hypochlorite bleach e.g. Clorox® regular bleach (commercially available from Clorox, 1221 Broadway, Oakland, Calif. 94612, USA) for 20 minutes. Transverse sections around 0.5 cm are placed on the medium in the top-up direction. Plant material is cultivated for 4 weeks on MS (Murashige, T., and Skoog, 1962. Physiol. Plant, vol. 15, 473-497) based medium incl. B5 vitamins (Gamborg, O., et al., 1968. Exp. Cell Res., vol. 50, 151-8) supplemented with 20 g/l sucrose, 500 mg/l casein hydrolysate, 0.8% agar and 5 mg/l 2,4-D at 23° C. in the dark. Cultures are transferred after 4 weeks onto identical fresh medium. Agrobacterium tumefaciens strain carrying a binary plasmid harbouring a selectable marker gene, for example hpt, is used in transformation experiments. One day before transformation, a liquid LB culture including antibiotics is grown on a shaker (28° C., 150 rpm) until an optical density (O.D.) at 600 nm of ˜0.6 is reached. Overnight-grown bacterial cultures are centrifuged and resuspended in MS based inoculation medium (O.D. ˜0.4) including acetosyringone, pH 5.5. Sugarcane embryogenic callus pieces (2-4 mm) are isolated based on morphological characteristics as compact structure and yellow colour and dried for 20 min. in the flow hood followed by immersion in a liquid bacterial inoculation medium for 10-20 minutes. Excess liquid is removed by filter paper blotting. Co-cultivation occurred for 3-5 days in the dark on filter paper which is placed on top of MS based medium incl. B5 vitamins containing 1 mg/l 2,4-D. After co-cultivation calli are washed with sterile water followed by a non-selective cultivation period on similar medium containing 500 mg/l cefotaxime for eliminating remaining Agrobacterium cells. After 3-10 days explants are transferred to MS based selective medium incl. B5 vitamins containing 1 mg/l 2,4-D for another 3 weeks harbouring 25 mg/l of hygromycin (genotype dependent). All treatments are made at 23° C. under dark conditions. Resistant calli are further cultivated on medium lacking 2,4-D including 1 mg/l BA and 25 mg/l hygromycin under 16 h light photoperiod resulting in the development of shoot structures. Shoots are isolated and cultivated on selective rooting medium (MS based including, 20 g/l sucrose, 20 mg/l hygromycin and 500 mg/l cefotaxime). Tissue samples from regenerated shoots are used for DNA analysis. Other transformation methods for sugarcane are known in the art, for example from the in-ternational application published as WO2010/151634A and the granted European patent EP1831378.

[0600] For transformation by particle bombardment the induction of callus and the transformation of sugarcane can be carried out by the method of Snyman et al. (Snyman et al., 1996, S. Afr. J. Bot 62, 151-154). The construct can be cotransformed with the vector pEmuKN, which expressed the npt[pi] gene (Beck et al. Gene 19, 1982, 327-336; Gen-Bank Accession No. V00618) under the control of the pEmu promoter (Last et al. (1991) Theor. Appl. Genet. 81, 581-588). Plants are regenerated by the method of Snyman et al. 2001 (Acta Horticulturae 560, (2001), 105-108).

### Example 9

### Phenotypic Evaluation Procedure

### 9.1 Evaluation Setup

[0601] 35 to 90 independent T0 rice transformants were generated. The primary transformants were transferred from a tissue culture chamber to a greenhouse for growing and harvest of T1 seed. Six events, of which the T1 progeny segregated 3:1 for presence/absence of the transgene, were retained. For each of these events, approximately 10 T1 seedlings containing the transgene (hetero-and homo-zygotes) and approximately 10 T1 seedlings lacking the transgene (nullizygotes) were selected by monitoring visual marker expression. The transgenic plants and the corresponding nullizygotes were grown side-by-side at random positions. Greenhouse conditions were of shorts days (12 hours light), 28° C. in the light and 22° C. in the dark, and a relative humidity of 70%. Plants grown under non-stress conditions are watered at regular intervals to ensure that water and nutrients are not limiting and to satisfy plant needs to complete growth and development, unless they were used in a stress screen.

[0602] From the stage of sowing until the stage of maturity the plants were passed several times through a digital imaging cabinet. At each time point digital images (2048×1536 pixels, 16 million colours) were taken of each plant from at least 6 different angles.

[0603] T1 events can be further evaluated in the T2 generation following the same evaluation procedure as for the T1 generation, e.g. with less events and/or with more individuals per event.

[0604] Drought Screen

[0605] T1 or T2 plants are grown in potting soil under normal conditions until they approached the heading stage. They are then transferred to a “dry” section where irrigation is withheld. Soil moisture probes are inserted in randomly chosen pots to monitor the soil water content (SWC). When SWC goes below certain thresholds, the plants are automatically re-watered continuously until a normal level is reached again. The plants are then re-transferred again to normal conditions. The rest of the cultivation (plant maturation, seed harvest) is the same as for plants not grown under abiotic stress conditions. Growth and yield parameters are recorded as detailed for growth under normal conditions.

[0606] Nitrogen use Efficiency Screen

[0607] T1 or T2 plants were grown in potting soil under normal conditions except for the nutrient solution. The pots were watered from transplantation to maturation with a specific nutrient solution containing reduced N nitrogen (N) content, usually between 7 to 8 times less. The rest of the cultivation (plant maturation, seed harvest) was the same as for plants not grown under abiotic stress. Growth and yield parameters were recorded as detailed for growth under normal conditions.

[0608] Salt Stress Screen

[0609] T1 or T2 plants are grown on a substrate made of coco fibers and particles of baked clay (Argex) (3 to 1 ratio). A normal nutrient solution is used during the first two weeks after transplanting the plantlets in the greenhouse. After the first two weeks, 25 mM of salt (NaCl) is added to the nutrient solution, until the plants are harvested. Growth and yield parameters are recorded as detailed for growth under normal conditions.

### 9.2 Statistical Analysis: F Test

[0610] A two factor ANOVA (analysis of variants) was used as a statistical model for the overall evaluation of plant phenotypic characteristics. An F test was carried out on all the parameters measured of all the plants of all the events transformed with the gene of the present invention. The F test was carried out to check for an effect of the gene over all the transformation events and to verify for an overall effect of the gene, also known as a global gene effect. The threshold for significance for a true global gene effect was set at a 5% probability level for the F test. A significant F test value points to a gene effect, meaning that it is not only the mere presence or position of the gene that is causing the differences in phenotype.

### 9.3 Parameters Measured

[0611] From the stage of sowing until the stage of maturity the plants were passed several times through a digital imaging cabinet. At each time point digital images (2048×1536 pixels, 16 million colours) were taken of each plant from at least 6 different angles as described in WO2010/031780. These measurements were used to determine different parameters.

[0612] Biomass-Related Parameter Measurement

[0613] The plant aboveground area (or leafy biomass) was determined by counting the total number of pixels on the digital images from aboveground plant parts discriminated from the background. This value was averaged for the pictures taken on the same time point from the different angles and was converted to a physical surface value expressed in square mm by calibration. Experiments show that the aboveground plant area measured this way correlates with the biomass of plant parts above ground. The above ground area is the area measured at the time point at which the plant had reached its maximal leafy biomass. Increase in root biomass is expressed as an increase in total root biomass (measured as maximum biomass of roots observed during the lifespan of a plant); or as an increase in the root/shoot index, measured as the ratio between root mass and shoot mass in the period of active growth of root and shoot. In other words, the root/shoot index is defined as the ratio of the rapidity of root growth to the rapidity of shoot growth in the period of active growth of root and shoot. Root biomass can be determined using a method as described in WO 2006/029987.

[0614] A robust indication of the height of the plant is the measurement of the location of the centre of gravity, i.e. determining the height (in mm) of the gravity centre of the leafy biomass. This avoids influence by a single erect leaf, based on the asymptote of curve fitting or, if the fit is not satisfactory, based on the absolute maximum.

[0615] Parameters Related to Development Time

[0616] The early vigour is the plant aboveground area three weeks post-germination. Early vigour was determined by counting the total number of pixels from aboveground plant parts discriminated from the background. This value was averaged for the pictures taken on the same time point from different angles and was converted to a physical surface value expressed in square mm by calibration.

[0617] AreaEmer is an indication of quick early development when this value is decreased compared to control plants. It is the ratio (expressed in %) between the time a plant needs to make 30% of the final biomass and the time needs to make 90% of its final biomass. The “time to flower” or “flowering time” of the plant can be determined using the method as described in WO 2007/093444.

[0618] Seed-Related Parameter Measurements

[0619] The mature primary panicles were harvested, counted, bagged, barcode-labelled and then dried for three days in an oven at 37° C. The panicles were then threshed and all the seeds were collected and counted. The seeds are usually covered by a dry outer covering, the husk. The filled husks (herein also named filled florets) were separated from the empty ones using an air-blowing device. The empty husks were discarded and the remaining fraction was counted again. The filled husks were weighed on an analytical balance. The total number of seeds was determined by counting the number of filled husks that remained after the separation step. The total seed weight was measured by weighing all filled husks harvested from a plant.

[0620] The total number of seeds (or florets) per plant was determined by counting the number of husks (whether filled or not) harvested from a plant.

[0621] Thousand Kernel Weight (TKW) is extrapolated from the number of seeds counted and their total weight.

[0622] The Harvest Index (HI) in the present invention is defined as the ratio between the total seed weight and the above ground area (mm²), multiplied by a factor 10⁶. The number of flowers per panicle as defined in the present invention is the ratio between the total number of seeds over the number of mature primary panicles. The “seed fill rate” or “seed filling rate” as defined in the present invention is the proportion (expressed as a %) of the number of filled seeds (i.e. florets containing seeds) over the total number of seeds (i.e. total number of florets). In other words, the seed filling rate is the percentage of florets that are filled with seed.

### Example 10

### Phenotypic Evaluation of the Transgenic Plants

[0623] Evaluation of transgenic rice plants expressing the nucleic acid encoding the FKBP16-3 polypeptide of SEQ ID NO: 2 under conditions of Nitrogen limitation revealed that the plants had a higher biomass compared to the control plants, the overall increase was 7% (p-value 0.00). In addition, plants expressing a FKBP16-3 nucleic acid showed a tendency for increased seed yield (overall increase for total seed weight: 8%, p-value 0.01; overall increase for TKW: 2% (p-value 0.00).

### Example 11

### Identification of Sequences Related to SEQ ID NO: 311 and SEQ ID NO: 312

[0624] Sequences (full length cDNA, ESTs or genomic) related to SEQ ID NO: YY1 and SEQ ID NO: 312 were identified amongst those maintained in the Entrez Nucleotides database at the National Center for Biotechnology Information (NCBl) using database sequence search tools, such as the Basic Local Alignment Tool (BLAST) (Altschul et al. (1990) J. Mol. Biol. 215:403-410; and Altschul et al. (1997) Nucleic Acids Res. 25:3389-3402). The program is used to find regions of local similarity between sequences by comparing nucleic acid or polypeptide sequences to sequence databases and by calculating the statistical significance of matches. For example, the polypeptide encoded by the nucleic acid of SEQ ID NO: 311 was used for the TBLASTN algorithm, with default settings and the filter to ignore low complexity sequences set off. The output of the analysis was viewed by pairwise comparison, and ranked according to the probability score (E-value), where the score reflect the probability that a particular alignment occurs by chance (the lower the E-value, the more significant the hit). In addition to E-values, comparisons were also scored by percentage identity. Percentage identity refers to the number of identical nucleotides (or amino acids) between the two compared nucleic acid (or polypeptide) sequences over a particular length. In some instances, the default parameters may be adjusted to modify the stringency of the search. For example the E-value may be increased to show less stringent matches. This way, short nearly exact matches may be identified.

[0625] Table A2 provides a list of nucleic acid sequences related to SEQ ID NO: 311 and SEQ ID NO: 312.

TABLE A2
Examples of QRR nucleic acids and polypeptides:

| | Nucleic acid | Polypeptide |
|---|---|---|
| Name | SEQ ID NO: | SEQ ID NO: |
| T.aestivum_QR1 | 311 | 312 |
| A.lyrata_497105 | 313 | 314 |
| A.thaliana_AT4G13010 | 315 | 316 |
| Aquilegia_sp_TC20675 | 317 | 318 |
| B.napus_TC69591 | 319 | 320 |
| C.annuum_TC15714 | 321 | 322 |
| C.sinensis_TC6204 | 323 | 324 |
| F.arundinacea_TC12243 | 325 | 326 |
| F.vesca_TA10332_57918 | 327 | 328 |
| G.barbadense_AY429443 | 329 | 330 |
| G.hirsutum_TC130047 | 331 | 332 |
| G.hirsutum_TC140265 | 333 | 334 |
| G.hirsutum_TC147786 | 335 | 336 |
| G.hirsutum_TC177781 | 337 | 338 |
| G.max_Glyma08g46150 | 339 | 340 |
| G.max_Glyma18g32900 | 341 | 342 |
| G.max_TC323858 | 343 | 344 |
| G.raimondii_TC1223 | 345 | 346 |
| G.raimondii_TC153 | 347 | 348 |
| G.raimondii_TC3677 | 349 | 350 |
| G.raimondii_TC8943 | 351 | 352 |
| H.annuus_TC43302 | 353 | 354 |
| H.argophyllus_TA1195_73275 | 355 | 356 |
| H.paradoxus_TA3468_73304 | 357 | 358 |
| H.petiolaris_TA69_4234 | 359 | 360 |
| H.vulgare_TC161606 | 361 | 362 |
| I.nil_TC2717 | 363 | 364 |
| L.japonicus_TC36853 | 365 | 366 |
| M.domestica_TC43564 | 367 | 368 |
| M.domestica_TC56292 | 369 | 370 |
| M.polymorpha_TA530_3197 | 371 | 372 |
| M.truncatula_AC202495_22.3 | 373 | 374 |
| N.tabacum_TC61288 | 375 | 376 |
| O.sativa_LOC_Os04g28870 | 377 | 378 |
| O.sativa_LOC_Os04g28990 | 379 | 380 |
| O.sativa_LOC_Os04g29030 | 381 | 382 |
| O.sativa_LOC_Os04g30420 | 383 | 384 |
| O.sativa_LOC_Os09g32570 | 385 | 386 |
| O.sativa_LOC_Os09g32620 | 387 | 388 |
| O.sativa_LOC_Os09g32640 | 389 | 390 |
| P.patens_123644 | 391 | 392 |
| P.patens_224076 | 393 | 394 |
| P.patens_NP13142767 | 395 | 396 |
| P.patens_TC28589 | 397 | 398 |
| P.patens_TC44738 | 399 | 400 |
| P.taeda_TA6285_3352 | 401 | 402 |
| P.trichocarpa_549573 | 403 | 404 |
| P.trichocarpa_583026 | 405 | 406 |
| P.trichocarpa_707961 | 407 | 408 |
| P.trifoliata_TA5736_37690 | 409 | 410 |
| P.virgatum_TC13461 | 411 | 412 |
| P.virgatum_TC2356 | 413 | 414 |
| P.vulgaris_TC9212 | 415 | 416 |
| R.communis_TA2888_3988 | 417 | 418 |
| S.bicolor_Sb02g029090 | 419 | 420 |
| S.bicolor_Sb02g029120 | 421 | 422 |
| S.bicolor_Sb05g020410 | 423 | 424 |
| S.bicolor_Sb06g008990 | 425 | 426 |
| S.lycopersicum_TC192399 | 427 | 428 |
| S.lycopersicum_TC193795 | 429 | 430 |
| S.lycopersicum_TC198674 | 431 | 432 |
| S.moellendorffii_231517 | 433 | 434 |
| S.moellendorffii_99539 | 435 | 436 |
| S.tuberosum_TC163668 | 437 | 438 |
| S.tuberosum_TC173247 | 439 | 440 |
| T.monococcum_QR1 | 441 | 442 |
| TvQR1_part | 443 | 444 |
| V.vinifera_GSVIVT00011023001 | 445 | 446 |
| Z.officinale_TA1952_94328 | 447 | 448 |
| Zea_mays_GRMZM2G126285_T02 | 449 | 450 |
| Zea_mays_GRMZM2G128935_T01 | 451 | 452 |
| Zea_mays_GRMZM2G139512_T02 | 453 | 454 |
| T.monococcum_QR2 | 455 | 456 |
| TvQR2 | 457 | 458 |
| A.lyrata_472635 | 459 | 460 |
| A.lyrata_478938 | 461 | 462 |
| A.lyrata_492720 | 463 | 464 |
| A.thaliana_AT1G23740 | 465 | 466 |
| A.thaliana_AT3G15090 | 467 | 468 |
| A.thaliana_AT4G21580 | 469 | 470 |
| Aquilegia_sp_TC22401 | 471 | 472 |
| Aquilegia_sp_TC25090 | 473 | 474 |
| C.annuum_TC15282 | 475 | 476 |
| C.intybus_TA2709_13427 | 477 | 478 |
| C.solstitialis_TA1305_347529 | 479 | 480 |
| C.vulgaris_35763 | 481 | 482 |
| C.vulgaris_68679 | 483 | 484 |
| C.vulgaris_69457 | 485 | 486 |
| C.vulgaris_80559 | 487 | 488 |
| Chlorella_34424 | 489 | 490 |
| Chlorella_59824 | 491 | 492 |
| E.huxleyi_415375 | 493 | 494 |
| E.huxleyi_70243 | 495 | 496 |
| F.ananassa_AY048861 | 497 | 498 |
| G.hirsutum_TC142488 | 499 | 500 |
| G.max_Glyma12g35620 | 501 | 502 |
| G.max_Glyma13g34810 | 503 | 504 |
| G.max_Glyma15g07400 | 505 | 506 |
| G.max_Glyma19g01120 | 507 | 508 |
| G.max_Glyma19g01140 | 509 | 510 |
| G.max_Glyma19g01160 | 511 | 512 |
| G.max_TC284243 | 513 | 514 |
| G.max_TC333053 | 515 | 516 |
| G.raimondii_TC3560 | 517 | 518 |
| H.annuus_TC40908 | 519 | 520 |
| H.argophyllus_TA3644_73275 | 521 | 522 |
| H.vulgare_c63138628hv270303@6151 | 523 | 524 |
| H.vulgare_TC171428 | 525 | 526 |
| I.nil_TC10 | 527 | 528 |
| I.nil_TC11560 | 529 | 530 |
| L.japonicus_TC39193 | 531 | 532 |
| L.japonicus_TC39495 | 533 | 534 |
| L.japonicus_TC46640 | 535 | 536 |
| L.perennis_TA1678_43195 | 537 | 538 |
| L.saligna_TA1845_75948 | 539 | 540 |
| L.serriola_TC7725 | 541 | 542 |
| M.domestica_TC42475 | 543 | 544 |
| M.domestica_TC44151 | 545 | 546 |
| M.polymorpha_TA1021_3197 | 547 | 548 |
| M.polymorpha_TA1880_3197 | 549 | 550 |
| M.truncatula_AC139600_6.4 | 551 | 552 |
| Micromonas_RCC299_102719 | 553 | 554 |
| Micromonas_RCC299_57654 | 555 | 556 |
| N.tabacum_TC42472 | 557 | 558 |
| N.tabacum_TC44553 | 559 | 560 |
| O.sativa_LOC_Os01g54940 | 561 | 562 |
| O.sativa_LOC_Os08g29170 | 563 | 564 |
| O.taurii_36970 | 565 | 566 |
| P.glauca_TA19292_3330 | 567 | 568 |
| P.glauca_TA21307_3330 | 569 | 570 |
| P.patens_123963 | 571 | 572 |
| P.patens_138140 | 573 | 574 |
| P.patens_153994 | 575 | 576 |
| P.patens_TC28583 | 577 | 578 |
| P.patens_TC32096 | 579 | 580 |
| P.persica_TC13091 | 581 | 582 |
| P.persica_TC8805 | 583 | 584 |
| P.persica_TC9160 | 585 | 586 |
| P.sitchensis_TA11915_3332 | 587 | 588 |
| P.sitchensis_TA11954_3332 | 589 | 590 |
| P.sitchensis_TA12150_3332 | 591 | 592 |
| P.sitchensis_TA12364_3332 | 593 | 594 |
| P.taeda_TA11453_3352 | 595 | 596 |
| P.taeda_TA2847_3352 | 597 | 598 |
| P.taeda_TA2859_3352 | 599 | 600 |
| P.taeda_TA7412_3352 | 601 | 602 |
| P.trichocarpa_647716 | 603 | 604 |
| P.trichocarpa_743889 | 605 | 606 |
| P.tricornutum_18893 | 607 | 608 |
| P.tricornutum_45509 | 609 | 610 |
| P.tricornutum_47141 | 611 | 612 |
| P.tricornutum_49717 | 613 | 614 |
| P.trifoliata_TA8497_37690 | 615 | 616 |
| P.virgatum_TC20067 | 617 | 618 |
| P.virgatum_TC43036 | 619 | 620 |
| P.vulgaris_TC12605 | 621 | 622 |
| P.vulgaris_TC8954 | 623 | 624 |
| P.vulgaris_TC9821 | 625 | 626 |
| R.communis_TA1576_3988 | 627 | 628 |
| R.communis_TA4857_3988 | 629 | 630 |
| S.bicolor_Sb03g034820 | 631 | 632 |
| S.bicolor_Sb04g036490 | 633 | 634 |
| S.bicolor_Sb06g029150 | 635 | 636 |
| S.lycopersicum_TC194786 | 637 | 638 |
| S.lycopersicum_TC195056 | 639 | 640 |
| S.moellendorffii_410874 | 641 | 642 |
| S.moellendorffii_73697 | 643 | 644 |
| S.moellendorffii_76590 | 645 | 646 |
| S.tuberosum_TC180363 | 647 | 648 |
| T.aestivum_c59976672@15422 | 649 | 650 |
| T.cacao_TC1626 | 651 | 652 |
| T.cacao_TC4139 | 653 | 654 |
| T.officinale_TA177_50225 | 655 | 656 |
| T.pratense_TA1143_57577 | 657 | 658 |
| T.pseudonana_2553 | 659 | 660 |
| T.pseudonana_4007 | 661 | 662 |
| Triphysaria_sp_TC8446 | 663 | 664 |
| Triphysaria_sp_TC8987 | 665 | 666 |
| Triphysaria_sp_TC9344 | 667 | 668 |
| V.vinifera_GSVIVT00002699001 | 669 | 670 |
| V.vinifera_GSVIVT00027760001 | 671 | 672 |
| Z.mays_TC460579 | 673 | 674 |
| Z.officinale_TA2244_94328 | 675 | 676 |
| Zea_mays_GRMZM2G055857_T01 | 677 | 678 |
| Zea_mays_GRMZM2G127361_T01 | 679 | 680 |

[0626] Sequences have been tentatively assembled and publicly disclosed by research institutions, such as The Institute for Genomic Research (TIGR; beginning with TA). For instance, the Eukaryotic Gene Orthologs (EGO) database may be used to identify such related sequences, either by keyword search or by using the BLAST algorithm with the nucleic acid sequence or polypeptide sequence of interest. Special nucleic acid sequence databases have been created for particular organisms, e.g. for certain prokaryotic organisms, such as by the Joint Genome Institute. Furthermore, access to proprietary databases, has allowed the identification of novel nucleic acid and polypeptide sequences.

### Example 12

### Alignment of QRR Polypeptide Sequences

[0627] Alignment of the polypeptide sequences was performed using the ClustalW 2.0 algorithm of progressive alignment (Thompson et al. (1997) Nucleic Acids Res 25:4876-4882; Chenna et al. (2003). Nucleic Acids Res 31:3497-3500) with standard setting (slow alignment, similarity matrix: Gonnet, gap opening penalty 10, gap extension penalty: 0.2). Minor manual editing can be done to further optimise the alignment.

### Example 13

### Calculation of Global Percentage Identity Between Polypeptide Sequences

[0628] Global percentages of similarity and identity between full length polypeptide sequences useful in performing the methods of the invention were determined using MatGAT (Matrix Global Alignment Tool) software (BMC Bioinformatics. 2003 4:29. MatGAT: an application that generates similarity/identity matrices using protein or DNA sequences. Campanella J J, Bitincka L, Smalley J; software hosted by Ledion Bitincka). MatGAT generates similarity/identity matrices for DNA or protein sequences without needing pre-alignment of the data. The program performs a series of pair-wise alignments using the Myers and Miller global alignment algorithm, calculates similarity and identity, and then places the results in a distance matrix.

[0629] Results of the MatGAT analysis are shown in FIG. 7 with global similarity and identity percentages over the full length of the polypeptide sequences. Sequence similarity is shown in the bottom half of the dividing line and sequence identity is shown in the top half of the diagonal dividing line. Parameters used in the analysis were: Scoring matrix: Blosum62, First Gap: 12, Extending Gap: 2. The sequence identity (in %) between the QRR polypeptide sequences useful in performing the methods of the invention can be as low as 42% compared to SEQ ID NO: 312 (T.aestivum_QR1, row 65).

[0630] Like for full length sequences, a MATGAT table based on subsequences of a specific domain, may be generated. Based on a multiple alignment of QRR polypeptides, such as for example the one of Example 2, a skilled person may select conserved sequences and submit as input for a MaTGAT analysis. This approach is useful where overall sequence conservation among QRR proteins is rather low.

### Example 14

### Identification of Domains Comprised in Polypeptide Sequences Useful in Performing the Methods of the Invention

[0631] The Integrated Resource of Protein Families, Domains and Sites (InterPro) database is an integrated interface for the commonly used signature databases for text-and sequence-based searches. The InterPro database combines these databases, which use different methodologies and varying degrees of biological information about well-characterized proteins to derive protein signatures. Collaborating databases include SWISS-PROT, PROSITE, TrEMBL, PRINTS, ProDom and Pfam, Smart and TIGRFAMs. Pfam is a large collection of multiple sequence alignments and hidden Markov models covering many common protein domains and families. Pfam is hosted at the Sanger Institute server in the United Kingdom. Interpro is hosted at the European Bioinformatics Institute in the United Kingdom.

[0632] The results of the InterPro scan (see Zdobnov E. M. and Apweiler R.; “InterProScan-an integration platform for the signature-recognition methods in InterPro.”; Bioinformatics, 2001, 17(9): 847-8; (InterPro database, release 40.0) of the polypeptide sequence as represented by SEQ ID NO: 312 are presented in Table D.

TABLE D
InterPro scan results (major accession numbers) of the polypeptide sequence as
represented by SEQ ID NO: 312.

| | | Other ID/ | | | |
|---|---|---|---|---|---|
| InterPro ID | Domain name | Method | Accession No | Location | e-value |
| IPR002085 | Alcohol dehydrogenase | HMMPanther | PTHR11695 | 1-335 | 1.40E−135 |
| | superfamily | | | | |
| IPR011032 | GroES-like | superfamily | SSF50129 | 5-157 | 1.4E−35 |
| IPR013154 | Alcohol dehydrogenase | HMMPfam | PF08240 | 39-102 | 1.5E−09 |
| | GroES-like | | | | |
| IPR020843 | Polyketide synthase, | HMMSmart | SM00829 | 21-331 | 5.6E−11 |
| | enoylreductase | | | | |
| NULL | no description | Gene3D | G3DSA: 3.90.180.10 | 10-213 | 4.4E−46 |
| | ALCOHOL | HMMPanther | PTHR11695: SF34 | 1-335 | 1.4E−135 |
| | DEHYDROGENASE, | | | | |
| | ZINC-CONTAINING | | | | |
| | ADH_zinc_N_2 | HMMPfam | PF13602 | 202-331 | 3.2e−19 |
| | NAD(P)-binding | superfamily | SSF51735 | 128-330 | 1.2e−30 |
| | Rossmann-fold domains | | | | |

[0633] In one embodiment a QRR polypeptide comprises a conserved domain (or motif) with at least 70%, 71%, 72%, 73%, 74%, 75%, 76%, 77%, 78%, 79%, 80%, 81%, 82%, 83%, 84%, 85%, 86%, 87%, 88%, 89%, 90%, 91%, 92%, 93%, 94%, 95%, 96%, 97%, 98%, or 99% sequence identity to a conserved domain from amino acid 1 to 335 in SEQ ID NO: 312).

### Example 15

### Topology Prediction of the QRR Polypeptide Sequences

[0634] TargetP 1.1 predicts the subcellular location of eukaryotic proteins. The location assignment is based on the predicted presence of any of the N-terminal pre-sequences: chloroplast transit peptide (cTP), mitochondrial targeting peptide (mTP) or secretory pathway signal peptide (SP). Scores on which the final prediction is based are not really probabilities, and they do not necessarily add to one. However, the location with the highest score is the most likely according to TargetP, and the relationship between the scores (the reliability class) may be an indication of how certain the prediction is. The reliability class (RC) ranges from 1 to 5, where 1 indicates the strongest prediction. For the sequences predicted to contain an N-terminal presequence a potential cleavage site can also be predicted. TargetP is maintained at the server of the Technical University of Denmark.

[0635] A number of parameters must be selected before analysing a sequence, such as organism group (non-plant or plant), cutoff sets (none, predefined set of cutoffs, or user-specified set of cutoffs), and the calculation of prediction of cleavage sites (yes or no).

[0636] The results of TargetP 1.1 analysis of the polypeptide sequence as represented by SEQ ID NO: 312 are presented Table E1. The “plant” organism group has been selected, no cutoffs defined, and the predicted length of the transit peptide requested. The subcellular localization of the polypeptide sequence as represented by SEQ ID NO: 312 may be the cytoplasm, no transit peptide is predicted.

TABLE E1
TargetP 1.1 analysis of the polypeptide sequence as represented by SEQ ID NO: 2.

| Name | Len | cTP | mTP | SP | other | Loc | RC | TPlen |
|---|---|---|---|---|---|---|---|---|
| T. aestivum_QR1 | 335 | 0.154 | 0.109 | 0.055 | 0.801 | — | 2 | — |
| cutoff | | 0.000 | 0.000 | 0.000 | 0.000 | | | |

Abbreviations:
Len, Length;
cTP, Chloroplastic transit peptide;
mTP, Mitochondrial transit peptide,
SP, Secretory pathway signal peptide,
other, Other subcellular targeting,
Loc, Predicted Location;
RC, Reliability class;
TPlen, Predicted transit peptide length.

[0637] Many other algorithms can be used to perform such analyses, including:
[0638] ChloroP 1.1 hosted on the server of the Technical University of Denmark;
[0639] Protein Prowler Subcellular Localisation Predictor version 1.2 hosted on the server of the Institute for Molecular Bioscience, University of Queensland, Brisbane, Australia;
[0640] PENCE Proteome Analyst PA-GOSUB 2.5 hosted on the server of the University of Alberta, Edmonton, Alberta, Canada;
[0641] TMHMM, hosted on the server of the Technical University of Denmark
[0642] PSORT (URL: psort.org)
[0643] PLOC (Park and Kanehisa, Bioinformatics, 19, 1656-1663, 2003).

[0644] Results from some of these predictions are provided in Table E2 hereunder, indicating a chloroplastic localisation:

TABLE E2

| | |
|---|---|
| Psort | cytoplasm 0.450, microbody (peroxisome) 0.300 |
| Plant-mPLOC (v2.0) | chloroplast |
| WOLF PSORT | chlo 10.0, mito 2.0, cyto 1.0 |
| TargetP (1.1) | chloro 0.154, qual 2 |
| ChloroP | non-chloroplastic 0.449 |
| SignalP4 | No signal peptide |
| Mitopred | Not available |
| MitoProtll | mitochondrial 0.1457 |
| Sosui | Soluble protein |
| Phobius | no transmembrane domain - no signal peptide |
| SubLoc v1.0 | Cytoplasmic, 56%, reliability 1 |

### Example 16

### Cloning of the QRR Encoding Nucleic Acid Sequence

[0645] The nucleic acid sequence was amplified by PCR using as template a custom-made Triticum aestivum seedlings cDNA library. PCR was performed using a commercially available proofreading Taq DNA polymerase in standard conditions, using 200 ng of template in a 50 μl PCR mix. The primers used were prm24481 (SEQ ID NO: 690; sense, start codon in bold): 5′-ggggacaagtttgtacaaaaaagcaggcttaaacaatggccaccccgac 3′ and prm24482 (SEQ ID NO: 691; reverse, complementary): 5′-ggggaccactttgtacaagaaagc tgggtttgacgacgatcagctct-3′, which include the AttB sites for Gateway recombination. The amplified PCR fragment was purified also using standard methods. The first step of the Gateway procedure, the BP reaction, was then performed, during which the PCR fragment recombined in vivo with the pDONR201 plasmid to produce, according to the Gateway terminology, an “entry clone”, pQRR. Plasmid pDONR201 was purchased from Invitrogen, as part of the Gateway® technology.

[0646] The entry clone comprising SEQ ID NO: 311 was then used in an LR reaction with a destination vector used for Oryza sativa transformation. This vector contained as functional elements within the T-DNA borders: a plant selectable marker; a screenable marker expression cassette; and a Gateway cassette intended for LR in vivo recombination with the nucleic acid sequence of interest already cloned in the entry clone. A rice GOS2 promoter (SEQ ID NO: 692) for constitutive expression was located upstream of this Gateway cassette.

[0647] After the LR recombination step, the resulting expression vector pGOS2:QRR (FIG. 8) was transformed into Agrobacterium strain LBA4044 according to methods well known in the art.

### Example 17

### Plant Transformation

[0648] Rice Transformation

[0649] The Agrobacterium containing the expression vector was used to transform Oryza sativa plants. Mature dry seeds of the rice japonica cultivar Nipponbare were dehusked. Sterilization was carried out by incubating for one minute in 70% ethanol, followed by 30 to 60 minutes, preferably 30 minutes in sodium hypochlorite solution (depending on the grade of contamination), followed by a 3 to 6 times, preferably 4 time wash with sterile distilled water. The sterile seeds were then germinated on a medium containing 2,4-D (callus induction medium). After incubation in light for 6 days scutellum-derived calli is transformed with Agrobacterium as described herein below.

[0650] Agrobacterium strain LBA4404 containing the expression vector was used for co-cultivation. Agrobacterium was inoculated on AB medium with the appropriate antibiotics and cultured for 3 days at 28° C. The bacteria were then collected and suspended in liquid co-cultivation medium to a density (OD₆₀₀) of about 1. The calli were immersed in the suspension for 1 to 15 minutes. The callus tissues were then blotted dry on a filter paper and transferred to solidified, co-cultivation medium and incubated for 3 days in the dark at 25° C. After washing away the Agrobacterium, the calli were grown on 2,4-D-containing medium for 10 to 14 days (growth time for indica: 3 weeks) under light at 28° C.-32° C. in the presence of a selection agent. During this period, rapidly growing resistant callus developed. After transfer of this material to regeneration media, the embryogenic potential was released and shoots developed in the next four to six weeks. Shoots were excised from the calli and incubated for 2 to 3 weeks on an auxin-containing medium from which they were transferred to soil. Hardened shoots were grown under high humidity and short days in a greenhouse.

[0651] Transformation of rice cultivar indica can also be done in a similar way as give above according to techniques well known to a skilled person.

[0652] 35 to 90 independent T0 rice transformants were generated for one construct. The primary transformants were transferred from a tissue culture chamber to a greenhouse. After a quantitative PCR analysis to verify copy number of the T-DNA insert, only single copy transgenic plants that exhibit tolerance to the selection agent were kept for harvest of T1 seed. Seeds were then harvested three to five months after transplanting. The method yielded single locus transformants at a rate of over 50% (Aldemita and Hodges1996, Chan et al. 1993, Hiei et al. 1994).

### Example 18

### Transformation of Other Crops

[0653] Corn Transformation

[0654] Transformation of maize (Zea mays) is performed with a modification of the method described by Ishida et al. (1996) Nature Biotech 14(6): 745-50. Transformation is genotype-dependent in corn and only specific genotypes are amenable to transformation and regeneration. The inbred line A188 (University of Minn.) or hybrids with A188 as a parent are good sources of donor material for transformation, but other genotypes can be used successfully as well. Ears are harvested from corn plant approximately 11 days after pollination (DAP) when the length of the immature embryo is about 1 to 1.2 mm. Immature embryos are cocultivated with Agrobacterium tumefaciens containing the expression vector, and transgenic plants are recovered through organogenesis. Excised embryos are grown on callus induction medium, then maize regeneration medium, containing the selection agent (for example imidazolinone but various selection markers can be used). The Petri plates are incubated in the light at 25° C. for 2-3 weeks, or until shoots develop. The green shoots are transferred from each embryo to maize rooting medium and incubated at 25° C. for 2-3 weeks, until roots develop. The rooted shoots are transplanted to soil in the greenhouse. T1 seeds are produced from plants that exhibit tolerance to the selection agent and that contain a single copy of the T-DNA insert.

[0655] Wheat Transformation

[0656] Transformation of wheat is performed with the method described by Ishida et al. (1996) Nature Biotech 14(6): 745-50. The cultivar Bobwhite (available from CIMMYT, Mexico) is commonly used in transformation. Immature embryos are co-cultivated with Agrobacterium tumefaciens containing the expression vector, and transgenic plants are recovered through organogenesis. After incubation with Agrobacterium, the embryos are grown in vitro on callus induction medium, then regeneration medium, containing the selection agent (for example imidazolinone but various selection markers can be used). The Petri plates are incubated in the light at 25° C. for 2-3 weeks, or until shoots develop. The green shoots are transferred from each embryo to rooting medium and incubated at 25° C. for 2-3 weeks, until roots develop. The rooted shoots are transplanted to soil in the greenhouse. T1 seeds are produced from plants that exhibit tolerance to the selection agent and that contain a single copy of the T-DNA insert.

[0657] Soybean Transformation

[0658] Soybean is transformed according to a modification of the method described in the Texas A&M patent U.S. Pat. No. 5,164,310. Several commercial soybean varieties are amenable to transformation by this method. The cultivar Jack (available from the Illinois Seed foundation) is commonly used for transformation. Soybean seeds are sterilised for in vitro sowing. The hypocotyl, the radicle and one cotyledon are excised from seven-day old young seedlings. The epicotyl and the remaining cotyledon are further grown to develop axillary nodes. These axillary nodes are excised and incubated with Agrobacterium tumefaciens containing the expression vector. After the cocultivation treatment, the explants are washed and transferred to selection media. Regenerated shoots are excised and placed on a shoot elongation medium. Shoots no longer than 1 cm are placed on rooting medium until roots develop. The rooted shoots are transplanted to soil in the greenhouse. T1 seeds are produced from plants that exhibit tolerance to the selection agent and that contain a single copy of the T-DNA insert.

[0659] Rapeseed/Canola Transformation

[0660] Cotyledonary petioles and hypocotyls of 5-6 day old young seedling are used as explants for tissue culture and transformed according to Babic et al. (1998, Plant Cell Rep 17: 183-188). The commercial cultivar Westar (Agriculture Canada) is the standard variety used for transformation, but other varieties can also be used. Canola seeds are surface-sterilized for in vitro sowing. The cotyledon petiole explants with the cotyledon attached are excised from the in vitro seedlings, and inoculated with Agrobacterium (containing the expression vector) by dipping the cut end of the petiole explant into the bacterial suspension. The explants are then cultured for 2 days on MSBAP-3 medium containing 3 mg/l BAP, 3% sucrose, 0.7% Phytagar at 23° C., 16 hr light. After two days of co-cultivation with Agrobacterium, the petiole explants are transferred to MSBAP-3 medium containing 3 mg/l BAP, cefotaxime, carbenicillin, or timentin (300 mg/I) for 7 days, and then cultured on MSBAP-3 medium with cefotaxime, carbenicillin, or timentin and selection agent until shoot regeneration. When the shoots are 5-10 mm in length, they are cut and transferred to shoot elongation medium (MSBAP-0.5, containing 0.5 mg/l BAP). Shoots of about 2 cm in length are transferred to the rooting medium (MSO) for root induction. The rooted shoots are transplanted to soil in the greenhouse. T1 seeds are produced from plants that exhibit tolerance to the selection agent and that contain a single copy of the T-DNA insert.

[0661] Alfalfa Transformation

[0662] A regenerating clone of alfalfa (Medicago sativa) is transformed using the method of (McKersie et al., 1999 Plant Physiol 119: 839-847). Regeneration and transformation of alfalfa is genotype dependent and therefore a regenerating plant is required. Methods to obtain regenerating plants have been described. For example, these can be selected from the cultivar Rangelander (Agriculture Canada) or any other commercial alfalfa variety as described by Brown DCW and A Atanassov (1985. Plant Cell Tissue Organ Culture 4: 111-112). Alternatively, the RA3 variety (University of Wisconsin) has been selected for use in tissue culture (Walker et al., 1978 Am J Bot 65:654-659). Petiole explants are cocultivated with an overnight culture of Agrobacterium tumefaciens C58C1 pMP90 (McKersie et al., 1999 Plant Physiol 119: 839-847) or LBA4404 containing the expression vector. The explants are cocultivated for 3 d in the dark on SH induction medium containing 288 mg/L Pro, 53 mg/L thioproline, 4.35 g/L K2SO4, and 100 μm acetosyringinone. The explants are washed in half-strength Murashige-Skoog medium (Murashige and Skoog, 1962) and plated on the same SH induction medium without acetosyringinone but with a suitable selection agent and suiTable A2ntibiotic to inhibit Agrobacterium growth. After several weeks, somatic embryos are transferred to BOi2Y development medium containing no growth regulators, no antibiotics, and 50 g/L sucrose. Somatic embryos are subsequently germinated on half-strength Murashige-Skoog medium. Rooted seedlings were transplanted into pots and grown in a greenhouse. T1 seeds are produced from plants that exhibit tolerance to the selection agent and that contain a single copy of the T-DNA insert.

[0663] Cotton Transformation

[0664] Cotton is transformed using Agrobacterium tumefaciens according to the method described in U.S. Pat. No. 5,159,135. Cotton seeds are surface sterilised in 3% sodium hypochlorite solution during 20 minutes and washed in distilled water with 500 μg/ml cefotaxime. The seeds are then transferred to SH-medium with 50 μg/ml benomyl for germination. Hypocotyls of 4 to 6 days old seedlings are removed, cut into 0.5 cm pieces and are placed on 0.8% agar. An Agrobacterium suspension (approx. 108 cells per ml, diluted from an overnight culture transformed with the gene of interest and suitable selection markers) is used for inoculation of the hypocotyl explants. After 3 days at room temperature and lighting, the tissues are transferred to a solid medium (1.6 g/l Gelrite) with Murashige and Skoog salts with B5 vitamins (Gamborg et al., Exp. Cell Res. 50:151-158 (1968)), 0.1 mg/l 2,4-D, 0.1 mg/l 6-furfurylaminopurine and 750 μg/ml MgCL2, and with 50 to 100 μg/ml cefotaxime and 400-500 μg/ml carbenicillin to kill residual bacteria. Individual cell lines are isolated after two to three months (with subcultures every four to six weeks) and are further cultivated on selective medium for tissue amplification (30° C., 16 hr photoperiod). Transformed tissues are subsequently further cultivated on non-selective medium during 2 to 3 months to give rise to somatic embryos. Healthy looking embryos of at least 4 mm length are transferred to tubes with SH medium in fine vermiculite, supplemented with 0.1 mg/l indole acetic acid, 6 furfurylaminopurine and gibberellic acid. The embryos are cultivated at 30° C. with a photoperiod of 16 hrs, and plantlets at the 2 to 3 leaf stage are transferred to pots with vermiculite and nutrients. The plants are hardened and subsequently moved to the greenhouse for further cultivation.

[0665] Sugarbeet Transformation

[0666] Seeds of sugarbeet (Beta vulgaris L.) are sterilized in 70% ethanol for one minute followed by 20 min. shaking in 20% Hypochlorite bleach e.g. Clorox® regular bleach (commercially available from Clorox, 1221 Broadway, Oakland, Calif. 94612, USA). Seeds are rinsed with sterile water and air dried followed by plating onto germinating medium (Murashige and Skoog (MS) based medium (Murashige, T., and Skoog, 1962. Physiol. Plant, vol. 15, 473-497) including B5 vitamins (Gamborg et al.; Exp. Cell Res., vol. 50, 151-8.) supplemented with 10 g/l sucrose and 0.8% agar). Hypocotyl tissue is used essentially for the initiation of shoot cultures according to Hussey and Hepher (Hussey, G., and Hepher, A., 1978. Annals of Botany, 42, 477-9) and are maintained on MS based medium supplemented with 30g/l sucrose plus 0.25 mg/l benzylamino purine and 0.75% agar, pH 5.8 at 23-25° C. with a 16-hour photoperiod. Agrobacterium tumefaciens strain carrying a binary plasmid harbouring a selectable marker gene, for example nptll, is used in transformation experiments. One day before transformation, a liquid LB culture including antibiotics is grown on a shaker (28° C., 150 rpm) until an optical density (O.D.) at 600 nm of ˜1 is reached. Overnight-grown bacterial cultures are centrifuged and resuspended in inoculation medium (O.D. ˜1) including Acetosyringone, pH 5.5. Shoot base tissue is cut into slices (1.0 cm×1.0 cm×2.0 mm approximately). Tissue is immersed for 30 s in liquid bacterial inoculation medium. Excess liquid is removed by filter paper blotting. Co-cultivation occurred for 24-72 hours on MS based medium incl. 30 g/l sucrose followed by a non-selective period including MS based medium, 30 g/l sucrose with 1 mg/l BAP to induce shoot development and cefotaxim for eliminating the Agrobacterium. After 3-10 days explants are transferred to similar selective medium harbouring for example kanamycin or G418 (50-100 mg/l genotype dependent). Tissues are transferred to fresh medium every 2-3 weeks to maintain selection pressure. The very rapid initiation of shoots (after 3-4 days) indicates regeneration of existing meristems rather than organogenesis of newly developed transgenic meristems. Small shoots are transferred after several rounds of subculture to root induction medium containing 5 mg/l NAA and kanamycin or G418. Additional steps are taken to reduce the potential of generating transformed plants that are chimeric (partially transgenic). Tissue samples from regenerated shoots are used for DNA analysis. Other transformation methods for sugarbeet are known in the art, for example those by Linsey & Gallois (Linsey, K., and Gallois, P., 1990. Journal of Experimental Botany; vol. 41, No. 226; 529-36) or the methods published in the international application published as WO9623891A.

[0667] Sugarcane Transformation

[0668] Spindles are isolated from 6-month-old field grown sugarcane plants (Arencibia et al., 1998. Transgenic Research, vol. 7, 213-22; Enriquez-Obregon et al., 1998. Planta, vol. 206, 20-27). Material is sterilized by immersion in a 20% Hypochlorite bleach e.g. Clorox® regular bleach (commercially available from Clorox, 1221 Broadway, Oakland, Calif. 94612, USA) for 20 minutes. Transverse sections around 0.5 cm are placed on the medium in the top-up direction. Plant material is cultivated for 4 weeks on MS (Murashige, T., and Skoog, 1962. Physiol. Plant, vol. 15, 473-497) based medium incl. B5 vitamins (Gamborg, O., et al., 1968. Exp. Cell Res., vol. 50, 151-8) supplemented with 20 g/l sucrose, 500 mg/l casein hydrolysate, 0.8% agar and 5 mg/l 2,4-D at 23° C. in the dark. Cultures are transferred after 4 weeks onto identical fresh medium. Agrobacterium tumefaciens strain carrying a binary plasmid harbouring a selectable marker gene, for example hpt, is used in transformation experiments. One day before transformation, a liquid LB culture including antibiotics is grown on a shaker (28° C., 150 rpm) until an optical density (O.D.) at 600 nm of ˜0.6 is reached. Overnight-grown bacterial cultures are centrifuged and resuspended in MS based inoculation medium (0.0.-0.4) including acetosyringone, pH 5.5. Sugarcane embryogenic callus pieces (2-4 mm) are isolated based on morphological characteristics as compact structure and yellow colour and dried for 20 min. in the flow hood followed by immersion in a liquid bacterial inoculation medium for 10-20 minutes. Excess liquid is removed by filter paper blotting. Co-cultivation occurred for 3-5 days in the dark on filter paper which is placed on top of MS based medium incl. B5 vitamins containing 1 mg/l 2,4-D. After co-cultivation calli are washed with sterile water followed by a non-selective cultivation period on similar medium containing 500 mg/l cefotaxime for eliminating remaining Agrobacterium cells. After 3-10 days explants are transferred to MS based selective medium incl. B5 vitamins containing 1 mg/l 2,4-D for another 3 weeks harbouring 25 mg/l of hygromycin (genotype dependent). All treatments are made at 23° C. under dark conditions. Resistant calli are further cultivated on medium lacking 2,4-D including 1 mg/l BA and 25 mg/l hygromycin under 16 h light photoperiod resulting in the development of shoot structures. Shoots are isolated and cultivated on selective rooting medium (MS based including, 20 g/l sucrose, 20 mg/l hygromycin and 500 mg/l cefotaxime). Tissue samples from regenerated shoots are used for DNA analysis. Other transformation methods for sugarcane are known in the art, for example from the in-ternational application published as WO2010/151634A and the granted European patent EP1831378.

### Example 19

### Phenotypic Evaluation Procedure

### 19.1 Evaluation Setup

[0669] 35 to 90 independent T0 rice transformants were generated. The primary transformants were transferred from a tissue culture chamber to a greenhouse for growing and harvest of T1 seed. Six events, of which the T1 progeny segregated 3:1 for presence/absence of the transgene, were retained. For each of these events, approximately 10 T1 seedlings containing the transgene (hetero-and homo-zygotes) and approximately 10 T1 seedlings lacking the transgene (nullizygotes) were selected by monitoring visual marker expression. The transgenic plants and the corresponding nullizygotes were grown side-by-side at random positions. Greenhouse conditions were of short days (12 hours light), 28° C. in the light and 22° C. in the dark, and a relative humidity of 70%. Plants grown under non-stress conditions were watered at regular intervals to ensure that water and nutrients were not limiting and to satisfy plant needs to complete growth and development, unless they were used in a stress screen.

[0670] From the stage of sowing until the stage of maturity the plants were passed several times through a digital imaging cabinet. At each time point digital images (2048×1536 pixels, 16 million colours) were taken of each plant from at least 6 different angles.

[0671] T1 events can be further evaluated in the T2 generation following the same evaluation procedure as for the T1 generation, e.g. with less events and/or with more individuals per event.

[0672] Drought Screen

[0673] T1 or T2 plants are grown in potting soil under normal conditions until they approached the heading stage. They are then transferred to a “dry” section where irrigation is withheld. Soil moisture probes are inserted in randomly chosen pots to monitor the soil water content (SWC). When SWC goes below certain thresholds, the plants are automatically re-watered continuously until a normal level is reached again. The plants are then re-transferred again to normal conditions. The rest of the cultivation (plant maturation, seed harvest) is the same as for plants not grown under abiotic stress conditions. Growth and yield parameters are recorded as detailed for growth under normal conditions.

[0674] Nitrogen Use Efficiency Screen

[0675] T1 or T2 plants were grown in potting soil under normal conditions except for the nutrient solution. The pots were watered from transplantation to maturation with a specific nutrient solution containing reduced N nitrogen (N) content, usually between 7 to 8 times less. The rest of the cultivation (plant maturation, seed harvest) was the same as for plants not grown under abiotic stress. Growth and yield parameters were recorded as detailed for growth under normal conditions.

[0676] Salt Stress Screen

[0677] T1 or T2 plants are grown on a substrate made of coco fibers and particles of baked clay (Argex) (3 to 1 ratio). A normal nutrient solution is used during the first two weeks after transplanting the plantlets in the greenhouse. After the first two weeks, 25 mM of salt (NaCl) is added to the nutrient solution, until the plants are harvested. Growth and yield parameters are recorded as detailed for growth under normal conditions.

### 19.2 Statistical Analysis: F Test

[0678] A two factor ANOVA (analysis of variants) was used as a statistical model for the overall evaluation of plant phenotypic characteristics. An F test was carried out on all the parameters measured of all the plants of all the events transformed with the gene of the present invention. The F test was carried out to check for an effect of the gene over all the transformation events and to verify for an overall effect of the gene, also known as a global gene effect. The threshold for significance for a true global gene effect was set at a 5% probability level for the F test. A significant F test value points to a gene effect, meaning that it is not only the mere presence or position of the gene that is causing the differences in phenotype.

### 19.3 Parameters Measured

[0679] From the stage of sowing until the stage of maturity the plants were passed several times through a digital imaging cabinet. At each time point digital images (2048×1536 pixels, 16 million colours) were taken of each plant from at least 6 different angles as described in WO2010/031780. These measurements were used to determine different parameters.

[0680] Biomass-Related Parameter Measurement

[0681] The plant aboveground area (or leafy biomass) was determined by counting the total number of pixels on the digital images from aboveground plant parts discriminated from the background. This value was averaged for the pictures taken on the same time point from the different angles and was converted to a physical surface value expressed in square mm by calibration. Experiments show that the aboveground plant area measured this way correlates with the biomass of plant parts above ground. The above ground area is the area measured at the time point at which the plant had reached its maximal leafy biomass.

[0682] Increase in root biomass is expressed as an increase in total root biomass (measured as maximum biomass of roots observed during the lifespan of a plant); or as an increase in the root/shoot index, measured as the ratio between root mass and shoot mass in the period of active growth of root and shoot. In other words, the root/shoot index is defined as the ratio of the rapidity of root growth to the rapidity of shoot growth in the period of active growth of root and shoot. Root biomass can be determined using a method as described in WO 2006/029987.

[0683] A robust indication of the height of the plant is the measurement of the location of the centre of gravity, i.e. determining the height (in mm) of the gravity centre of the leafy biomass. This avoids influence by a single erect leaf, based on the asymptote of curve fitting or, if the fit is not satisfactory, based on the absolute maximum.

[0684] Parameters Related to Development Time

[0685] The early vigour is the plant aboveground area three weeks post-germination. Early vigour was determined by counting the total number of pixels from aboveground plant parts discriminated from the background. This value was averaged for the pictures taken on the same time point from different angles and was converted to a physical surface value expressed in square mm by calibration.

[0686] AreaEmer is an indication of quick early development when this value is decreased compared to control plants. It is the ratio (expressed in %) between the time a plant needs to make 30% of the final biomass and the time needs to make 90% of its final biomass.

[0687] The “time to flower” or “flowering time” of the plant can be determined using the method as described in WO 2007/093444.

[0688] Seed-Related Parameter Measurements

[0689] The mature primary panicles were harvested, counted, bagged, barcode-labelled and then dried for three days in an oven at 37° C. The panicles were then threshed and all the seeds were collected and counted. The seeds are usually covered by a dry outer covering, the husk. The filled husks (herein also named filled florets) were separated from the empty ones using an air-blowing device. The empty husks were discarded and the remaining fraction was counted again. The filled husks were weighed on an analytical balance. The total number of seeds was determined by counting the number of filled husks that remained after the separation step. The total seed weight was measured by weighing all filled husks harvested from a plant.

[0690] The total number of seeds (or florets) per plant was determined by counting the number of husks (whether filled or not) harvested from a plant. Thousand Kernel Weight (TKW) is extrapolated from the number of seeds counted and their total weight.

[0691] The Harvest Index (HI) in the present invention is defined as the ratio between the total seed weight and the above ground area (mm²), multiplied by a factor 10⁶.

[0692] The number of flowers per panicle as defined in the present invention is the ratio between the total number of seeds over the number of mature primary panicles. The “seed fill rate” or “seed filling rate” as defined in the present invention is the proportion (expressed as a %) of the number of filled seeds (i.e. florets containing seeds) over the total number of seeds (i.e. total number of florets). In other words, the seed filling rate is the percentage of florets that are filled with seed.

### Example 20

### Results of the Phenotypic Evaluation of the Transgenic Plants

[0693] Evaluation of transgenic rice plants expressing the nucleic acid encoding the QRR polypeptide of SEQ ID NO: 312 under conditions of Nitrogen limitation revealed that the plants had an increase of at least 5% for leafy biomass (AreaMax), early height of the plant (EarlyHeight), and height of the gravity centre of the leafy biomass of the plant (GravityYMax) (Table F1):

TABLE F1
Data summary for transgenic rice plants; for each parameter, the overall
percent increase is shown and for each parameter the p-value is <0.05.

| Parameter | Overall increase % |
|---|---|
| AreaMax | 9.0 |
| EarlyHeight | 13.0 |
| GravityYMax | 4.0 |

[0694] Furthermore, some lines had a tendency for increased amount of thick roots (RootThickMax), and total weight of seeds (totalwgseeds) (Table F2):

TABLE F2

| Parameter | Positive events (out of 6) | Overall increase % |
|---|---|---|
| RootThickMax | 2 | 7.0 |
| totalwgseeds | 2 | 8.0 |

### Example 21

### Sugarcane Phenotypic Evaluation Procedure

[0695] 21.1 The transgenic sugarcane plants generated are grown for 10 to 15 months, either in the greenhouse or the field. Standard conditions for growth of the plants are used.

[0696] 21.2 Sugar Extraction Method

[0697] Stalks of sugarcane plants which are 10 to 15 months old and have more than 10 internodes are harvested. After all of the leaves have been removed, the internodes of the stalk are numbered from top (=1) to bottom (for example =36). A stalk disc approximately 1-2 g in weight is excised from the middle of each internode. The stalk discs of 3 internodes are then combined to give one sample and frozen in liquid nitrogen.

[0698] For the sugar extraction, the stalk discs are first comminuted in a Waring blender (from Waring, New Hartford, Conn., USA). The sugars are extracted by shaking for one hour at 95° C. in 10 mM sodium phosphate buffer pH 7.0. Thereafter, the solids are removed by filtration through a 30 μm sieve. The resulting solution is subsequently employed for the sugar determination (see herein below).

[0699] 21.3 Fresh Weight and Biomass

[0700] The transgenic sugarcane plants expressing the FKBP16-3 polypeptide are grown for 10 to 15 months. In each case a sugarcane stalk of the transgenic line and a wild-type sugarcane plant is defoliated, the stalk is divided into segments of 3 internodes, and these internode segments are frozen in liquid nitrogen in a sealed 50 ml plastic container. The fresh weight of the samples is determined. The extraction for the purposes of the sugar determination is done as described below.

[0701] The stem biomass is increased in the transgenic plant.

[0702] 21.4 Sugar Determination (Glucose, Fructose and Sucrose)

[0703] The glucose, fructose and sucrose contents in the extract obtained in accordance with the sugar extraction method described above is determined photometrically in an enzyme assay via the conversion of NAD+ (nicotinamide adenine dinucleotide) into NADH (reduced nicotinamide adenine dinucleotide). During the reduction, the aromatic character at the nicotinamide ring is lost, and the absorption spectrum thus changes. This change in the absorption spectrum can be detected photometrically. The glucose and fructose present in the extract is converted into glucose-6-phosphate and fructose-6-phosphate by means of the enzyme hexokinase and adenosin triphosphate (ATP). The glucose-6-phosphate is subsequently oxidized by the enzyme glucose-6-phosphate dehydrogenase to give 6-phosphogluconate. In this reaction, NAD+ is reduced to give NADH, and the amount of NADH formed is determined photometrically. The ratio between the NADH formed and the glucose present in the extract is 1:1, so that the glucose content can be calculated from the NADH content using the molar absorption coefficient of NADH (6.3 l per mmol and per cm lightpath). Following the complete oxidation of glucose-6-phosphate, fructose-6-phosphate, which has likewise formed in the solution, is converted by the enzyme phosphoglucoisomerase to give glucose-6-phosphate which, in turn, is oxidized to give 6-phosphogluconate. Again, the ratio between fructose and the amount of NADH formed is 1:1. Thereafter, the sucrose present in the extract is cleaved by the enzyme sucrase (Megazyme) to give glucose and fructose. The glucose and fructose molecules liberated are then converted with the abovementioned enzymes in the NAD+-dependent reaction to give 6-phosphogluconate. The conversion of one sucrose molecule into 6-phosphogluconate results in two NADH molecules. The amount of NADH formed is likewise determined photometrically and used for calculating the sucrose content, using the molar absorption coefficient of NADH.

[0704] The sugarcane stalks are divided into segments of in each case three internodes, as specified above. The internodes are numbered from top to bottom (top=internode 1, bottom=internode 21). In the sugarcane wild-type plant, the sucrose contents rises from internode 1-3 up to internode 10-12. The sucrose contents of all subsequent internodes are similarly high.

[0705] In the transgenic lines, which comprises the FKBP16-3 encoding gene the storage carbohydrate content in the stalk likewise climbs. The mean storage carbohydrate content is higher than the sucrose content in the sugarcane wild-type plants.

[0706] In total, it can be observed that, surprisingly, the sucrose content in the internodes of the transgenic sugarcane line is higher than in the wild type.

The application's sequence listing, which the Patent Office published only in electronic form, follows.

SEQUENCE LISTING (692 sequences)

SEQ ID NO: 1 - DNA, 744 bp, Triticum aestivum
atggctgctgctgcctcttcctcggcctcgccgcttctcctcccgtcagggccgcgtggcgctagctcgagggcctggcttcccagcggcggcggcggcggcggcagggcgttcatcagaggtggcaacagcagggcgccatgctgcaggagggctgccgctggcggaggaagcgcggcgcaatgcggaggagctgacgacgacaacggtggcgtggtcacccggaggggcgtggtcggggcggtggttctgggggtgtcgtcgtccgcgttatgcctgcaggccgcgctcgacgccttcgccggcgggctgccgccggaggagaagcccaagctctgcgacgccgcctgcgaggcagagctcgaaaatctgcctatggtgactacggagtccggtttgcagtacaaggacatcaaagtcgggcaagggccgagtccgcccgttggcttccaggttgctgcaaactgcatcgccatggtgccaaacggacagatattcgacagctcgctggagaaaggccagccctacatattccgtgttggcgcaggacaggtgataaagggacttgatgaagggatcttgtcgatgaaagttggaggattacgtcggttgtacatacccggtcaattagcattccctaagggccttacatcagctcccgggaggccaagagtggctccgagcagccccgtcgtatttgacgtcaacctattgttcgtacctggtcttgacgatgatgagtga

SEQ ID NO: 2 - protein, 247 aa, Triticum aestivum
MAAAASSSASPLLLPSGPRGASSRAWLPSGGGGGGRAFIRGGNSRAPCCRRAAAGGGSAAQCGGADDDNGGVVTRRGVVGAVVLGVSSSALCLQAALDAFAGGLPPEEKPKLCDAACEAELENLPMVTTESGLQYKDIKVGQGPSPPVGFQVAANCIAMVPNGQIFDSSLEKGQPYIFRVGAGQVIKGLDEGILSMKVGGLRRLYIPGQLAFPKGLTSAPGRPRVAPSSPVVFDVNLLFVPGLDDDE

SEQ ID NO: 3 - DNA, 1179 bp, Saccharomyces cerevisiae
atgtctgatatgcttccattggctacgtatagcctgaatgttgaaccatactccccaaccccagctctgaacttcaaaattccggttaccattagaatcacaatggcggccatcgaccctgagccctttgacgatgacaaaaagccatctactttaagaataatcaaaaggaatcctgaactcactcgcggtgagtactacaaccaagataacaatgacggcctcgaagaggatgaaagtgaaagtgaacaagaagcagatgtaccaaaaaggagtgtcaaatcaaaaaaaggtaaggcagtcgagcaaagtgaatcagaagactctgaagatgaaaacgaaatcgacgatgaattcgaagaatgcgttcttttaaccttatctccaaaaggccaatatcaacaagctttggatattaccattgcaccagaggaagacgttcaattcgtcgttaccggttcatacactatctctctaaccggtaactacgtcaaacatccattcgacaattcttcagattcagacgaagatgaagaagactattacagtgacgaagaatcttccaatggagaagaagaagaagaagaagaagaagaggacgatgaggaactaagttccggtgatgacgatcttgatgatttagtagatgctagtgacatcgaaagtcgtcttgatgaattagtcaaaaaggacgaaaagaagaaaaacaacaagaaggacagtaaaaggaaacatgaggaagatgaggaagaaagtgctaaacctgccgagaaaaaacaaacgaccaagaaagacaagaaagcagagaaagttaaagactcggaagagagcaaaccaaagccaaagacgaagctactggaaggcggtattatcattgaagaccgcgtcacaggaaaaggcccacatgccaaaaagggtaccagagttggaatgagatatgttggtaagttgaagaacgggaaagtttttgacaagaatacaaagggtaagccttttgtttttaagttgggccaaggcgaagtaattaaaggatgggacatcggtgttgctggtatggcggtcggtggtgagcgtagaattgtcattcctgctccatatgcctacggtaaacaagctttgcccggtattcctgctaactctgaattgacatttgatgttaaattggtctccatgaaatag

SEQ ID NO: 4 - protein, 392 aa, Saccharomyces cerevisiae
MSDMLPLATYSLNVEPYSPTPALNFKIPVTIRITMAAIDPEPFDDDKKPSTLRIIKRNPELTRGEYYNQDNNDGLEEDESESEQEADVPKRSVKSKKGKAVEQSESEDSEDENEIDDEFEECVLLTLSPKGQYQQALDITIAPEEDVQFVVTGSYTISLTGNYVKHPFDNSSDSDEDEEDYYSDEESSNGEEEEEEEEEDDEELSSGDDDLDDLVDASDIESRLDELVKKDEKKKNNKKDSKRKHEEDEEESAKPAEKKQTTKKDKKAEKVKDSEESKPKPKTKLLEGGIIIEDRVTGKGPHAKKGTRVGMRYVGKLKNGKVFDKNTKGKPFVFKLGQGEVIKGWDIGVAGMAVGGERRIVIPAPYAYGKQALPGIPANSELTFDVKLVSMK

SEQ ID NO: 5 - DNA, 450 bp, Nicotiana tabacum
atgaaattcagccgcgcattcaatgccgcttcagttctcttagttcttcttcttattaccatagttacggctaagaagtccggtgatgttacggaattgcagatcggtgtgaagtttaagccaaaatcttgcgaacttaaggctcacaagggtgatagagtctcagtacactacagtggaaaacttacagatggaactgtatttgactccagctatgagaggaatgaccccattgagtttgagcttggaagtggtcaagtgattaaaggttgggatcaaggacttcttggaatgtgcgtgggagagaagcgaaagttgaagatccctgctaaacttggttatggcgagagtggatctccaccaaagattccaggtggtgctacacttgtcttcgacactgagctggttgctgtgaatggaaagagatcagcagctgatagtgaactgtga

SEQ ID NO: 6 - protein, 149 aa, Nicotiana tabacum
MKFSRAFNAASVLLVLLLITIVTAKKSGDVTELQIGVKFKPKSCELKAHKGDRVSVHYSGKLTDGTVFDSSYERNDPIEFELGSGQVIKGWDQGLLGMCVGEKRKLKIPAKLGYGESGSPPKIPGGATLVFDTELVAVNGKRSAADSEL

SEQ ID NO: 7 - DNA, 459 bp, Triticum aestivum
atggcgaagccgcggcttcttctctgcctgctggtcgccgccgccgcgctcctgctcgtcgcctccgcgaagaagtccggcgacgtctcggcgctccagatcggcgtcaagtacaagccagaatcctgcagcatctcggctcacaaaggtgacagagttaaagttcactaccgtggaacacttaccgatggaacagttttcgattctagctttgaaaggggtgacccgattgaatttgaattgggcactggtcaagtgatcaaaggatgggatcagggaattttgggcatgtgcattggtgagaagaggaagctgaagatcccttcaaagctcggctatggggatcagggatcaccacctaccattccaggcggagcaactctcatattcgacacagagcttgtcgctgtcaatggcgagccatctagcaaatcagaggaggatgacgctgatctgtag

SEQ ID NO: 8 - protein, 152 aa, Triticum aestivum
MAKPRLLLCLLVAAAALLLVASAKKSGDVSALQIGVKYKPESCSISAHKGDRVKVHYRGTLTDGTVFDSSFERGDPIEFELGTGQVIKGWDQGILGMCIGEKRKLKIPSKLGYGDQGSPPTIPGGATLIFDTELVAVNGEPSSKSEEDDADL

SEQ ID NO: 9 - DNA, 744 bp, Arabidopsis thaliana
atggcgaatctgttcactgctacggctcctttcctctcactctcgaagccattcaccaaaacggcatcgtaccaccagtgttacgcctcttcttccaatccgccggagcctgagtcttcttctcctcctcctcctccgcctccgcctcaaccgctggcatcgcaacagaagaggaagaagaacgttgagacgacggattgggtcgcttcttccttgacccggcggtttggaatcggcgcgggtcttgcctgggcgggctttctggctttcggtgtaatctccgagcagatcaagactcggattgaggtttctcaggaagtagctaacaccagagatgtagaagaagagaaagagattgtgttgcccaacggcataaggtactatgatcaacgggttggaggaggagcaacaccaagagcaggagacttggtagtgattgatctaaaggggcaagtgcaaggaaccggacaagtattcgtggatacatttggaaccaaagacaagaagaagatgaagccattggcacttgtggtgggttcaaaaccatatagcaaaggattatgtgaaggcatagattatgtactaaggtccatgaaggctggaggtaaacgcagagtgattgttccaccatcgttaggatttggtgtagacggtgctgaattggaatcgggtttgcagattcctcctaatgcttcgttggaatatatagttgagattgatagagtctcaattgcaccagcttga

SEQ ID NO: 10 - protein, 247 aa, Arabidopsis thaliana
MANLFTATAPFLSLSKPFTKTASYHQCYASSSNPPEPESSSPPPPPPPPQPLASQQKRKKNVETTDWVASSLTRRFGIGAGLAWAGFLAFGVISEQIKTRIEVSQEVANTRDVEEEKEIVLPNGIRYYDQRVGGGATPRAGDLVVIDLKGQVQGTGQVFVDTFGTKDKKKMKPLALVVGSKPYSKGLCEGIDYVLRSMKAGGKRRVIVPPSLGFGVDGAELESGLQIPPNASLEYIVEIDRVSIAPA

SEQ ID NO: 11 - DNA, 699 bp, Arabidopsis thaliana
atggcttccattagtagcttacacagatgggcatctaatcaacactctcgtcttcctcgaatcacttctatttctgaggctgaccaatctcgacccattaaccaagtcgtcgccttttcggttcctatatccagaagagacgcgagtattattcttctcagctcgattccattgacaagcttcttcgttctaacaccgagctcttccgaagctagagagagacgtagcagaaaagttatccctctcgaggaatattccactggccctgaagggttgaaattctatgacattgaggaaggcaaaggtccagtagcaacagagggatcaactgctcaggtgcattttgattgccgttacagaagcatcactgcaatttctacccgagaatccaagcttttagctggaaaccgtagtattgctcagccttacgagttcaaggtgggatctacgccaggaaaggaaaggaagcgtgaattcgttgataatccaaatgggttattctctgcacaggctgcaccaaaacctcctccagcaatgtatttcattaccgaaggaatgaaagtcggaggcaagagaacggtgattgttcctcctgaagctggttatggtcagaaaggaatgaatgagataccgcctggagctacttttgagttaaacatagagctgcttcgggtgactcctccaccagaagagaagtga

SEQ ID NO: 12 - protein, 232 aa, Arabidopsis thaliana
MASISSLHRWASNQHSRLPRITSISEADQSRPINQVVAFSVPISRRDASIILLSSIPLTSFFVLTPSSSEARERRSRKVIPLEEYSTGPEGLKFYDIEEGKGPVATEGSTAQVHFDCRYRSITAISTRESKLLAGNRSIAQPYEFKVGSTPGKERKREFVDNPNGLFSAQAAPKPPPAMYFITEGMKVGGKRTVIVPPEAGYGQKGMNEIPPGATFELNIELLRVTPPPEEK

SEQ ID NO: 13 - DNA, 705 bp, Arabidopsis thaliana
atggcgactctcttcactgcgacggttccttctcaccaccgtttcgtctctccatcccaacatccgaaacagagtcttctatcgcagtcgctaagcgtcacattcacggagaatccacaaccaacggcggtggtcacattgcaggagcagcaattgacggattggattacttctccggtgacgcgacggttcggaatcggcgccgggtttacctgggctgggtttttagctttcggtgttgtctccgagcagatgaagaagtcacgactcgatgtgtttcaggaagaggataacacaagaggtttagaaaagcaagaagagatcatcttaccaaacggcataaggtactatgatctacaagttggaagtggagctactccaagctcaggatacttggtagtgtttgatgtaaagggacaagtacatggcactgaacaagtgttcgtggacacatttggaggcaaaggcaagtcactagcgatggtaatggactcaagaccgtatagcaagggactatgccaaggtatagagcatgttctcaggtcaatgaaggctggaggtaaacgtagagtgataattccaccgtccttaggatttggagacagaaatgtcgaatttggacagggtttggagattcctccatctgcaacacttgactatatcatcgaggttgatacagtttattgtttccaaactattgtatga

SEQ ID NO: 14 - protein, 234 aa, Arabidopsis thaliana
MATLFTATVPSHHRFVSPSQHPKQSLLSQSLSVTFTENPQPTAVVTLQEQQLTDWITSPVTRRFGIGAGFTWAGFLAFGVVSEQMKKSRLDVFQEEDNTRGLEKQEEIILPNGIRYYDLQVGSGATPSSGYLVVFDVKGQVHGTEQVFVDTFGGKGKSLAMVMDSRPYSKGLCQGIEHVLRSMKAGGKRRVIIPPSLGFGDRNVEFGQGLEIPPSATLDYIIEVDTVYCFQTIV

SEQ ID NO: 15 - DNA, 672 bp, Arabidopsis thaliana
atggcagcttcttctccatctctccttctaccactaggttcagcatctagaaatggtctaaccaccaagaatccaaattcatcaagatatatagctgcaagagtcatagcttcagaaacaagagagcaaagctgtaaaatcagtaatctctctagccgtagagaagcaatgcttttggtactcggcgtctcaggaggattatcaatgagctcacttgcggcgtatgcagctggtttacctccagaagataaaccaagactctgtgaagcagaatgcgagaaagagcttgaaaatgttccaatggtaactacagagtcagggcttcagtataaggatattaaagttggtagaggcccgagtccaccggttggttttcaggttgctgctaattatgtggctatggttccatcagggcaaatattcgacagttctctggagaaaggtctaccgtatctatttcgcgttggctctggccaggtgatcaaaggacttgatgaaggaatcttgagtatgaaagctggtggcaaacgtagactctacatcccagggcctttggcgtttccaaagggtctagtttcagctccagggaggccgagagttgcgccaaacagcccggtgatatttgacgtgagcttagagttcataccaggtctcgattcagaggaagagtga

SEQ ID NO: 16 - protein, 223 aa, Arabidopsis thaliana
MAASSPSLLLPLGSASRNGLTTKNPNSSRYIAARVIASETREQSCKISNLSSRREAMLLVLGVSGGLSMSSLAAYAAGLPPEDKPRLCEAECEKELENVPMVTTESGLQYKDIKVGRGPSPPVGFQVAANYVAMVPSGQIFDSSLEKGLPYLFRVGSGQVIKGLDEGILSMKAGGKRRLYIPGPLAFPKGLVSAPGRPRVAPNSPVIFDVSLEFIPGLDSEEE

SEQ ID NO: 17 - DNA, 693 bp, Arabidopsis thaliana
atgatcttaacaatgaaacttgttcaccctctccatcactctttgtcttcctccattccctttccctcaagaaaaaggcaatccaaaccgtaccggtgctcgttaccttctcccggctgcgaaaaggtcatcagaacagagactgtcctgcctccggcgccggtgagttgtgaagggagaagggtcttacttggatgtcttctcgctacagcttctgggattttgtcaactggttcagccgaggcagtaagcaccagtagaagagctctacgtgcatccaagttaccggaaagcgatttcacgactctccccaatggtctcaagtactatgatataaaggttggcaatggagcagaggctgtgaaaggatctcgggtcgcagttcactatgttgcaaaatggaaagggataacgttcatgacaagtcgacaaggacttggtgttggaggtggaacgccttatgggtttgacgttggtcaatcagagagaggcaatgttctgaaaggacttgatcttggtgttgaagggatgcgtgtaggcggtcagagattggtgattgttcctcccgagctggcttacgggaagaaaggagtgcaagagattcctccaaacgctacgatagagcttgacattgagctgttatcaatcaagcagagtcctttcgggacgccagtgaagatagttgaaggctaa

SEQ ID NO: 18 - protein, 230 aa, Arabidopsis thaliana
MILTMKLVHPLHHSLSSSIPFPSRKRQSKPYRCSLPSPGCEKVIRTETVLPPAPVSCEGRRVLLGCLLATASGILSTGSAEAVSTSRRALRASKLPESDFTTLPNGLKYYDIKVGNGAEAVKGSRVAVHYVAKWKGITFMTSRQGLGVGGGTPYGFDVGQSERGNVLKGLDLGVEGMRVGGQRLVIVPPELAYGKKGVQEIPPNATIELDIELLSIKQSPFGTPVKIVEG

SEQ ID NO: 19 - DNA, 1500 bp, Arabidopsis thaliana
atggctttttggggagttgaagtgaagccaggcaaaactttcactcttaagaataatgaagctacaggaatcagaagacttcacctttcccaggcaacattgggccatggtactgcaaccaatagaagcattctacagtgtaacgttgggaacaaaagtcccctcttgttatgtgtcttgactcctgataaagttgattcttgccaattgaatctggagtttgaagaaactgatgaggttatcttctctgtcatcggacctcggagtgtacacctcactggctacttcctcggaaggagtaccgggtttaggccaaatgatgatgaatcagagtcatttggagaagacattgttgacacagacatggagaaaggtagcagtgatgattatgactacagtgatagtttcattaacgacgacgatccagctgtccgtggttcacacgtgtctagtactgatgatgatgaaatatctattaaggagatgacagctaaaacaaaagagaagaaaaaaaatggaaaaggtagaagactaaggaagaagtttcaagtttctgattcagattctgatgaaacttcggctagagctgatgaatctagcaatgaggattctgtagaagtacttaacaatggtaatgagcccaagatcgcgaaggtccattcttcagagagtcctctgccttcaagggttacgaggtcgaaggcaagaaaatcgactttggaaagtggtgagcctgccaagtgtgagaagacatttgaagcaaaaattaatactcacaagactctggataatagggaggataaaccattggatgatgctaaactgtctcccgtccagaaagactgtgaaattctttcgaagaaaaaaagaaacaaggaaaggtctaagagttcagctataattattgactcagatgacggagaggggaaaaatatgcctgaaagtcttcagaatgagaatccagtttctgacaaggggatcaaatcatcaagtgatgtattactttctcagaatggtgatgcaactctatcaaagaaaaagaagaaaagggataggagagaggaaactacagatgtcccggaatgtccagagaagaagaaacaagctatcgacaagaacatcgagaaagaagctggtactaagaaaccactagaaacgaggactttatcaaatggagtgatcattgaagatattgaaaaaggaaagttagatggaaaatcagctgttaaagggaaaaaggtcagtatactctatactgggaagttgaaagacaccgggaacttgtttgattcaaacttgggagaagatccactaagattccgcttaggtggagaaaatgtcatagaaggtctcagcattggtgttgaaggaatgcgagttggtgataagagaagactcataataccgccagccctcgggtactcaaaaaggggattgaaggaaaaggtgcctaagagtgcgtggcttgtctatgaagtggaggctgtaaaaatcagataa

SEQ ID NO: 20 - protein, 499 aa, Arabidopsis thaliana
MAFWGVEVKPGKTFTLKNNEATGIRRLHLSQATLGHGTATNRSILQCNVGNKSPLLLCVLTPDKVDSCQLNLEFEETDEVIFSVIGPRSVHLTGYFLGRSTGFRPNDDESESFGEDIVDTDMEKGSSDDYDYSDSFINDDDPAVRGSHVSSTDDDEISIKEMTAKTKEKKKNGKGRRLRKKFQVSDSDSDETSARADESSNEDSVEVLNNGNEPKIAKVHSSESPLPSRVTRSKARKSTLESGEPAKCEKTFEAKINTHKTLDNREDKPLDDAKLSPVQKDCEILSKKKRNKERSKSSAIIIDSDDGEGKNMPESLQNENPVSDKGIKSSSDVLLSQNGDATLSKKKKKRDRREETTDVPECPEKKKQAIDKNIEKEAGTKKPLETRTLSNGVIIEDIEKGKLDGKSAVKGKKVSILYTGKLKDTGNLFDSNLGEDPLRFRLGGENVIEGLSIGVEGMRVGDKRRLIIPPALGYSKRGLKEKVPKSAWLVYEVEAVKIR

SEQ ID NO: 21 - DNA, 1098 bp, Arabidopsis thaliana
atggatgaatctctggagcatcaaactcaaacacatgaccaagagagcgaaatagttactgaaggaagtgccgttgtgcatagtgagccatctcaagagggtaatgttcctcctaaagttgatagtgaagctgaggtcttggatgagaaagtcagtaagcagattataaaggaaggtcacggttccaaaccatccaagtactctacatgctttttgcactacagggcatggaccaaaaactcgcagcacaaatttgaggatacatggcatgagcagcaacctattgaattggttcttggaaaagagaaaaaagaactagccggtttagccatcggtgttgctagcatgaagtctggtgaacgtgcgcttgtgcatgttggctgggaattagcttatgggaaagaaggaaacttttcttttccgaatgttccacctatggcagacttgttatatgaggtggaagttattgggtttgatgaaacaaaggagggaaaagctcgcagtgatatgactgtagaggaaaggattggtgcagcagacagaagaaaaatggatgggaattctctttttaaggaggagaaactggaggaagccatgcaacagtatgaaatggccatagcatacatgggggacgattttatgtttcagctgtatgggaagtaccaggatatggctttagcagttaaaaacccatgccatcttaacatagcagcttgcctcatcaaactaaaacgatacgatgaagcaattggtcactgcaacattgtgttgacagaagaagagaaaaacccaaaagcactgttcagaagagggaaagcaaaggcagagctaggacagatggactcagcacgtgatgatttccgaaaggcacaaaagtatgctcctgacgacaaggcgattagaagagagctacgagcacttgcagagcaagagaaagccttgtaccaaaagcagaaagaaatgtacaaaggaatattcaaagggaaagatgaaggtggtgctaagtcaaagagccttttttggttgatagtgttatggcaatggtttgtttcccttttctcccgtatctttcgacgccacagagttaaagcagattaa

SEQ ID NO: 22 - protein, 365 aa, Arabidopsis thaliana
MDESLEHQTQTHDQESEIVTEGSAVVHSEPSQEGNVPPKVDSEAEVLDEKVSKQIIKEGHGSKPSKYSTCFLHYRAWTKNSQHKFEDTWHEQQPIELVLGKEKKELAGLAIGVASMKSGERALVHVGWELAYGKEGNFSFPNVPPMADLLYEVEVIGFDETKEGKARSDMTVEERIGAADRRKMDGNSLFKEEKLEEAMQQYEMAIAYMGDDFMFQLYGKYQDMALAVKNPCHLNIAACLIKLKRYDEAIGHCNIVLTEEEKNPKALFRRGKAKAELGQMDSARDDFRKAQKYAPDDKAIRRELRALAEQEKALYQKQKEMYKGIFKGKDEGGAKSKSLFWLIVLWQWFVSLFSRIFRRHRVKAD

SEQ ID NO: 23 - DNA, 462 bp, Arabidopsis thaliana
atgatgagctctgcatccgccatgaaagctgttggatttttgcttctgcttaccattctaacattagcttatgcgaagaagtcaggtgatgtgacagagttgcagattggtgttaagtacaagcctcagaaatgtgatctccaggctcacaaaggggataagatcaaggttcactatcggggaaagttaactgatggaactgtctttgattcaagttttgagagaggtgaccctattgagtttgagcttggaactggtcaagtcatcccaggatgggaccagggtttattgggagcttgtgtaggtgagaagagaaagttgaaaatcccatccaagcttggttatggtgataacggctcaccaccaaaaatcccgggtggggcgacactgatattcgacaccgagcttgttgctgtgaacggagaaccatccagcgaagcgaaatcaaagaatgagctttga

SEQ ID NO: 24 - protein, 153 aa, Arabidopsis thaliana
MMSSASAMKAVGFLLLLTILTLAYAKKSGDVTELQIGVKYKPQKCDLQAHKGDKIKVHYRGKLTDGTVFDSSFERGDPIEFELGTGQVIPGWDQGLLGACVGEKRKLKIPSKLGYGDNGSPPKIPGGATLIFDTELVAVNGEPSSEAKSKNEL

SEQ ID NO: 25 - DNA, 1656 bp, Arabidopsis thaliana
atggatgctaatttcgagatgcctccagtcggtggaatgaacgacgacgacgacatggatttcggtgacggcgcctcgtttcttaaagtcggtgaagagaaagagatccaacaaggtttgaagaagaagcttcttaaagaaggtgaaggatatgaaactcctgagaatggcgatgaagttgaagtgcattacactggaactttgcttgatgggacgaagtttgattcgagtcgtgatagagcaacgcctttcaaattcactcttggacaaggtcaagttattaaaggatgggatattggtattaagacgatgaagaaaggtgaaaacgctgttttcactatacctgcggagctagcatatggggaatctggttccccgccaactattcctgcgaatgctacgcttcagtttgatgtggagttgcttaaatgggacagtgtgaaggatatatgtaaagatggtggtgtgtttaagaagattcttgctgttggagagaagtgggagaatccaaaggaccttgatgaagttcttgttaagtttgaggcgaaacttgaggatggtactgttgttgggaaatctgatggtgtggagttcactgttaaagatggtcatttctgccctgcacttactaaggctgtgaaaactatgaaaaagggtgaaaaggtccttctgacagttaaaccacaatatggttttggggagaagggcaagccagcctctgctggtgaaggcgcggttcctcctaatgcgacgctcgagatcaatttggagttagtttcgtggaaaacagtgtcagaagtaactgatgataacaaggttgtgaagaaagtcttgaaggaaggggatggatatgagcgtcctaacgagggggcagttgtgaaagtgaaattgatagggaaacttcaagatggtactgtatttttgaagaaaggtcatggtgagaatgaggaaccgtttgagttcaaaacagatgaagagcaagttgtcgatggacttgatagagctgtcatgaagatgaaaaagggtgaagtggcattggtgaccatagaccctgagtatgcctttggttctaatgagtcacaacaggaattggctgtggtgccgccaaactcaactgttacttatgaggttgacctattgactttcgacaaggaaagggaatcgtgggacatgaacactgaggagaagattgaagctgctagtaagaagaaggaagaaggaaattccaagtttaaaggaggcaaatattccctggcttccaagagatatgagaaggctgtcaaattcattgaatacgacacatccttcagtgaggaagagaagaagcaagcaaaagcattgaaggtggcatgcaatctaaacgatgcagcctgcaaactcaaattgaaagattacaagcaggccgaaaaactatgcacaaaggtgttagagctagaaagcaccaatgtgaaggccttataccggagagcgcaagcgtacatggagttgtctgatttagacttggccgagtttgatgtcaagaaggcccttgaaatcgatcccaacaacagggaagtgaagctagagcagaaaaggttgaaggagaaaatgaaggaattcaataaaaaggaagccaaattttatggaaacatgtttgcgaaactaagtaaggaataa

SEQ ID NO: 26 - protein, 551 aa, Arabidopsis thaliana
MDANFEMPPVGGMNDDDDMDFGDGASFLKVGEEKEIQQGLKKKLLKEGEGYETPENGDEVEVHYTGTLLDGTKFDSSRDRATPFKFTLGQGQVIKGWDIGIKTMKKGENAVFTIPAELAYGESGSPPTIPANATLQFDVELLKWDSVKDICKDGGVFKKILAVGEKWENPKDLDEVLVKFEAKLEDGTVVGKSDGVEFTVKDGHFCPALTKAVKTMKKGEKVLLTVKPQYGFGEKGKPASAGEGAVPPNATLEINLELVSWKTVSEVTDDNKVVKKVLKEGDGYERPNEGAVVKVKLIGKLQDGTVFLKKGHGENEEPFEFKTDEEQVVDGLDRAVMKMKKGEVALVTIDPEYAFGSNESQQELAVVPPNSTVTYEVDLLTFDKERESWDMNTEEKIEAASKKKEEGNSKFKGGKYSLASKRYEKAVKFIEYDTSFSEEEKKQAKALKVACNLNDAACKLKLKDYKQAEKLCTKVLELESTNVKALYRRAQAYMELSDLDLAEFDVKKALEIDPNNREVKLEQKRLKEKMKEFNKKEAKFYGNMFAKLSKE

SEQ ID NO: 27 - DNA, 1908 bp, Arabidopsis thaliana
atggcggtaggcgatcagacggagcagaattacttgccgaagaagaagaaatccgaaacggaagatgataagaggaggaagaaaattgttcccgggagcttgttgaaagctgtggtgcgacctggaggaggtgattcgagccccgttgatggtgatcaggttatttatcactgcactgtacggacactggatggtgtagttgtggaatctacgaggtcagaatctggagggagaggtgtaccgatcagagatgtcttgggaaacagcaaaatgattcttggattgctcgaaggaattcccacgatgcacaagggtgaaattgcaatgttcaagatgaaacctgaaatgcactatgcagagattgattgtccagtctcagctccagaaaattttccaaaagatgatgagcttcattttgagattgagttgttggatttttctaaagccaagattgcaagtgatgatctgggggtcatcaagaagattctaaatgaaggtgagggctgggaatctcccagagaaccctatgaagtgaaagccagaatatctgctaaatccggtgatggacacgtgatcttctctcacacagaagaaccttatttcttcacatttggaaaatctgaggtgcctaaaggtcttgaaatcggaattggaaccatggctcggaaggagaaggcagtgatatatgttcgcaagcagtacttgactgaatctcctttgttgcatatagatcaagaccttgaggaagttcattttgaggttgaactggtacatttcattcaggtgcgggacatgcttggagatggacgtctcataaaacgtcgaattcgagatggaagaggcgagtttccaatggattgtcctctccaagatagtcgtttaagcgttcactacaagggcatgcttctcaatgaagagaagactgtcttctatgatagcaagattgacaataatgatcaaccgttggagttcagttcaggagaaggactggtccctgaagggtttgagatgtgtactcgtttgatgctacctggggagattgctcttgttacatgcccccctgattatgcatatgacaaatttccgagaccacctggcgtgtctgaaggtgcacatgttcagtgggagattgaactccttggtttcgaaacgccaagagactggactggcttgaacttccagagcatcatggacgaggcagataaaatcagaagcacgggtaataggcttttcaaagaaggaaaatttgagctcgcaaaagcaaagtacgaaaaggtgctccgggaatttaatcatgttaacccacaagatgaagatgaaggaaaaatatttggtgacacaaggaatatgttacatctgaatgttgcggcttgcttgcttaaaatgggagagtggaggaagtctatagagacatgcaataaggttctagaagcaaagcctggtcatgtgaaaggtctataccgccgcggaatggcttacattgcaggtggagagtatgatgacgctagaaatgacttcaatatgatgatcaaagtggataaatcatcagaagctgatgcgaccgctgctctattgaaactgaagcagaaggaacaggaagcggagagcaaggctagaaaacagttcaaaggattattcgacaagagaccgggggagataaccgaagttggttcagaaataagagaggagtctaaaactatagaagaagtagatgagacaaaggataatgatgatgatgaaacactggaagaagaaggagctacgacagtgagcacggaaaggaagaggaaatggtcggagaaagcctggccgtttctgaagaacgtgatgctccaaatcggaatccagcttggtgttgttctgatagggattttgattttccagtttgtgagcgccaaatttacatga

SEQ ID NO: 28 - protein, 635 aa, Arabidopsis thaliana
MAVGDQTEQNYLPKKKKSETEDDKRRKKIVPGSLLKAVVRPGGGDSSPVDGDQVIYHCTVRTLDGVVVESTRSESGGRGVPIRDVLGNSKMILGLLEGIPTMHKGEIAMFKMKPEMHYAEIDCPVSAPENFPKDDELHFEIELLDFSKAKIASDDLGVIKKILNEGEGWESPREPYEVKARISAKSGDGHVIFSHTEEPYFFTFGKSEVPKGLEIGIGTMARKEKAVIYVRKQYLTESPLLHIDQDLEEVHFEVELVHFIQVRDMLGDGRLIKRRIRDGRGEFPMDCPLQDSRLSVHYKGMLLNEEKTVFYDSKIDNNDQPLEFSSGEGLVPEGFEMCTRLMLPGEIALVTCPPDYAYDKFPRPPGVSEGAHVQWEIELLGFETPRDWTGLNFQSIMDEADKIRSTGNRLFKEGKFELAKAKYEKVLREFNHVNPQDEDEGKIFGDTRNMLHLNVAACLLKMGEWRKSIETCNKVLEAKPGHVKGLYRRGMAYIAGGEYDDARNDFNMMIKVDKSSEADATAALLKLKQKEQEAESKARKQFKGLFDKRPGEITEVGSEIREESKTIEEVDETKDNDDDETLEEEGATTVSTERKRKWSEKAWPFLKNVMLQIGIQLGVVLIGILIFQFVSAKFT

SEQ ID NO: 29 - DNA, 1638 bp, Arabidopsis thaliana
atgattcttggattgctcgaaggaattcccacgatgcacaagggtgaaattgcaatgttcaagatgaaacctgaaatgcactatgcagagattgattgtccagtctcagctccagaaaattttccaaaagatgatgagcttcattttgagattgagttgttggatttttctaaagccaagattgcaagtgatgatctgggggtcatcaagaagattctaaatgaaggtgagggctgggaatctcccagagaaccctatgaagtgaaagccagaatatctgctaaatccggtgatggacacgtgatcttctctcacacagaagaaccttatttcttcacatttggaaaatctgaggtgcctaaaggtcttgaaatcggaattggaaccatggctcggaaggagaaggcagtgatatatgttcgcaagcagtacttgactgaatctcctttgttgcatatagatcaagaccttgaggaagttcattttgaggttgaactggtacatttcattcaggtgcgggacatgcttggagatggacgtctcataaaacgtcgaattcgagatggaagaggcgagtttccaatggattgtcctctccaagatagtcgtttaagcgttcactacaagggcatgcttctcaatgaagagaagactgtcttctatgatagcaagattgacaataatgatcaaccgttggagttcagttcaggagaaggactggtccctgaagggtttgagatgtgtactcgtttgatgctacctggggagattgctcttgttacatgcccccctgattatgcatatgacaaatttccgagaccacctggcgtgtctgaaggtgcacatgttcagtgggagattgaactccttggtttcgaaacgccaagagactggactggcttgaacttccagagcatcatggacgaggcagataaaatcagaagcacgggtaataggcttttcaaagaaggaaaatttgagctcgcaaaagcaaagtacgaaaaggtgctccgggaatttaatcatgttaacccacaagatgaagatgaaggaaaaatatttggtgacacaaggaatatgttacatctgaatgttgcggcttgcttgcttaaaatgggagagtggaggaagtctatagagacatgcaataaggttctagaagcaaagcctggtcatgtgaaaggtctataccgccgcggaatggcttacattgcaggtggagagtatgatgacgctagaaatgacttcaatatgatgatcaaagtggataaatcatcagaagctgatgcgaccgctgctctattgaaactgaagcagaaggaacaggaagcggagagcaaggctagaaaacagttcaaaggattattcgacaagagaccgggggagataaccgaagttggttcagaaataagagaggagtctaaaactatagaagaagtagatgagacaaaggataatgatgatgatgaaacactggaagaagaaggagctacgacagtgagcacggaaaggaagaggaaatggtcggagaaagcctggccgtttctgaagaacgtgatgctccaaatcggaatccagcttggtgttgttctgatagggattttgattttccagtttgtgagcgccaaatttacatga

SEQ ID NO: 30 - protein, 545 aa, Arabidopsis thaliana
MILGLLEGIPTMHKGEIAMFKMKPEMHYAEIDCPVSAPENFPKDDELHFEIELLDFSKAKIASDDLGVIKKILNEGEGWESPREPYEVKARISAKSGDGHVIFSHTEEPYFFTFGKSEVPKGLEIGIGTMARKEKAVIYVRKQYLTESPLLHIDQDLEEVHFEVELVHFIQVRDMLGDGRLIKRRIRDGRGEFPMDCPLQDSRLSVHYKGMLLNEEKTVFYDSKIDNNDQPLEFSSGEGLVPEGFEMCTRLMLPGEIALVTCPPDYAYDKFPRPPGVSEGAHVQWEIELLGFETPRDWTGLNFQSIMDEADKIRSTGNRLFKEGKFELAKAKYEKVLREFNHVNPQDEDEGKIFGDTRNMLHLNVAACLLKMGEWRKSIETCNKVLEAKPGHVKGLYRRGMAYIAGGEYDDARNDFNMMIKVDKSSEADATAALLKLKQKEQEAESKARKQFKGLFDKRPGEITEVGSEIREESKTIEEVDETKDNDDDETLEEEGATTVSTERKRKWSEKAWPFLKNVMLQIGIQLGVVLIGILIFQFVSAKFT

SEQ ID NO: 31 - DNA, 573 bp, Arabidopsis thaliana
atgggtgatgcaatcgatttgagtggagatggtggcgtcttgaaaaagattgtaaggagtgccaaacctgatgctatttcaccctctgatgatcttcctgttgtcgatgttcattatgagggtatcttggctgaagacgaaaaggttttcgacactactcgcgaagacaatcttgttttctcctttgagttaggaacaggcagtgttatccgttcttgggacattgctcttaaaaccatgaaggttggagaagttgcaaaaattacatgtaagccagaatatgcttacggaagagccgggtctcctcccgacatcccacctgatgcaactttgattttcgaggtggaattggttgcttgtagaccgaggaaaggtgctagtgttggaagtgtttctgaagagagagccaggctagaagatctgaagaagcagagagagattgctgcagctgcgaaagaggatgataagaaaaagagagaagaagcaaaagctgctgcagctgctaggattcaagctaagctagacgctaagaaaggtccaggcaaaggaaaaggcaaaggcaaagctaaataa

SEQ ID NO: 32 - protein, 190 aa, Arabidopsis thaliana
MGDAIDLSGDGGVLKKIVRSAKPDAISPSDDLPVVDVHYEGILAEDEKVFDTTREDNLVFSFELGTGSVIRSWDIALKTMKVGEVAKITCKPEYAYGRAGSPPDIPPDATLIFEVELVACRPRKGASVGSVSEERARLEDLKKQREIAAAAKEDDKKKREEAKAAAAARIQAKLDAKKGPGKGKGKGKAK

SEQ ID NO: 33 - DNA, 729 bp, Arabidopsis thaliana
atggtgacgattctatcaactcctctctctccaagacttacatttctctgtgaaacaaaactgtcattatctcggagcaatcgctcggtatgttgttcattgagtgaagaaccaaaagaccaatgcttgagtcggagaagtcttgtttatgttttagttgcttcgccgtgtttgttgttaccagcgttgtcttcatctgcgaagactaaatcaaagagtccttatgatgagagacggttactagaacagaacaagaggatacagagagagaacaatgctcctgacgagtttcctaactttgttagagaaggttttgaggttaaggtattagcttctgataattacatcaaggctgattctggcctcatatatcgggatttcaatgttggtcaaggtgatttcccaaaagatggtcagcaggtgacttttcactacattggctacaatgagtctggaaggcgaatagatagtacttacatacaaggttctcctgctagaatccgcatgggaaccaatgcacttgttccaggatttgaaatgggaattcgtgacatgaagcccggtgggcgaagaaggattataatccctccagaattgggacctccggtgggaccttcgaccttcttcagctcgaagcaatttgaagttttcgacgtggagttgctcagtatccagaattgtgagaggaggactataataggtttctactcagatgtcacatgcagttaa

SEQ ID NO: 34 - protein, 242 aa, Arabidopsis thaliana
MVTILSTPLSPRLTFLCETKLSLSRSNRSVCCSLSEEPKDQCLSRRSLVYVLVASPCLLLPALSSSAKTKSKSPYDERRLLEQNKRIQRENNAPDEFPNFVREGFEVKVLASDNYIKADSGLIYRDFNVGQGDFPKDGQQVTFHYIGYNESGRRIDSTYIQGSPARIRMGTNALVPGFEMGIRDMKPGGRRRIIIPPELGPPVGPSTFFSSKQFEVFDVELLSIQNCERRTIIGFYSDVTCS

SEQ ID NO: 35 - DNA, 690 bp, Arabidopsis thaliana
atgattcggtgcttcgcgtggacaccactagtaggtgctcccttaatcaccaccgtccatttcacatctccgccatctctcagaatcttcgcatctcgttcttccgcaccatcatcatcatcatcatcatcatcgacagttgcagcagcatctagaagatcaatatctctgtcaattatcgccgtcacgtcttccgtcgtctcctccttttgcttctcgtctccggcactagccgacttctctgaaatccctaattccggcggcgttaaagctctcgacctccgaatcggcgatggtgacgttcccattgaaggagatcagattgaaatacattactatgggagattagctgcgaagcaaggatggagatttgattcaacatatgatcataaagatagtaatggtgaagctgttcctttcacattcgtccttggttctagcaaagtaattccggggattgaaacagctgtgaggtctatgaaagtaggcgggattcgtcgggtggttatacctccatctcagggataccagaatacatcacaggagcctctcccaccaaacttctttgacagacagagactcttcacgactatatttaacccaacacgtctcgccaatggagaaggttctactcttggaactctcgtttttgacattgaacttgtcagcaccagacgccttcaccgatga

SEQ ID NO: 36 - protein, 229 aa, Arabidopsis thaliana
MIRCFAWTPLVGAPLITTVHFTSPPSLRIFASRSSAPSSSSSSSSTVAAASRRSISLSIIAVTSSVVSSFCFSSPALADFSEIPNSGGVKALDLRIGDGDVPIEGDQIEIHYYGRLAAKQGWRFDSTYDHKDSNGEAVPFTFVLGSSKVIPGIETAVRSMKVGGIRRVVIPPSQGYQNTSQEPLPPNFFDRQRLFTTIFNPTRLANGEGSTLGTLVFDIELVSTRRLHR

SEQ ID NO: 37 - DNA, 1434 bp, Arabidopsis thaliana
atgggattctggggacttgaagtgaaacctgggaagcctcaagcttataatccaaaaaatgaacaaggaaagattcacgtgacccaggcaactctaggtacgggtttgagcaaagaaaagagtgtgattcagtgttcaataggagacaaggctcctattgctttgtgttcattgttgccaaacaaaatcgaatgttgccctctgaatcttgagtttgacgatgatgatgagccagtggaattcaccgtgactggtgacagaagtatccacttgtctggattcttggagtattatcaggacgatgaagatgattatgagcatgatgaagatgattcagatggtattgatgttggtgagtctgaggaagacgattcgtgtgaatatgatagtgaagaggatgagcaattggatgaatttgaagacttccttgatagcaatcttgaaaggtatcggaatgctgctgccccaaagagtggagttataattgaggagatagaagatgaagagaaacctgccaaagataataaggcaaaacaaaccaagaagaagagtcaagctagcgaaggtgagaatgcaaagaaacaaatcgttgccatagagggtgcccatgttccagttttggaaagcgaagatgaagacgaagacggtttacctattcctaaaggaaaatcatctgaagtagagaatgcgtcaggtgagaagatggttgtagataatgacgaacaaggtagtaacaagaaacggaaggccaaggctgctgagcaagatgatggacaagaaagtgcaaacaagagtaaaaagaagaaaaatcagaaagagaagaagaaaggggaaaatgtcttaaatgaggaagctggacaagttcagacgggaaatgttctgaagaagcaggatattagccaaatttcttcaaacacaaaagctcaagatggaactgcaaacaatgccatgagtgaaagctccaagaccccagataaatctgctgagaagaaaactaaaaataagaaaaagaagaaaccaagtgacgaagctgcagaaatttctggtactgttgagaagcaaaccccagcggactccaagtcttctcaagtacggacatacccaaatgggctcattgttgaagagttgagcatgggaaaacccaacggcaagagagctgatcctggaaaaacggtttctgtgcgctatattggaaaacttcagaagaatgggaagattttcgattccaacattggaaaatcaccatttaagtttcgtctaggtattggatcagtcattaagggatgggatgttggagttaatggcatgcgcgttggtgacaaaaggaagcttacaattcctccatcaatggggtatggtgtgaagggtgctggtggccagattcctcctaattcttggctgacttttgatgtcgaactgattaatgttcaataa

SEQ ID NO: 38 - protein, 477 aa, Arabidopsis thaliana
MGFWGLEVKPGKPQAYNPKNEQGKIHVTQATLGTGLSKEKSVIQCSIGDKAPIALCSLLPNKIECCPLNLEFDDDDEPVEFTVTGDRSIHLSGFLEYYQDDEDDYEHDEDDSDGIDVGESEEDDSCEYDSEEDEQLDEFEDFLDSNLERYRNAAAPKSGVIIEEIEDEEKPAKDNKAKQTKKKSQASEGENAKKQIVAIEGAHVPVLESEDEDEDGLPIPKGKSSEVENASGEKMVVDNDEQGSNKKRKAKAAEQDDGQESANKSKKKKNQKEKKKGENVLNEEAGQVQTGNVLKKQDISQISSNTKAQDGTANNAMSESSKTPDKSAEKKTKNKKKKKPSDEAAEISGTVEKQTPADSKSSQVRTYPNGLIVEELSMGKPNGKRADPGKTVSVRYIGKLQKNGKIFDSNIGKSPFKFRLGIGSVIKGWDVGVNGMRVGDKRKLTIPPSMGYGVKGAGGQIPPNSWLTFDVELINVQ

SEQ ID NO: 39 - DNA, 624 bp, Arabidopsis thaliana
atggcgatggctatggagatttctcttcctttcgttggatcatccatggccttaagcgcgggaaaatcaaggaacagcgtttctaggattagtcgtgttggattctcttcggtctcggctgtacatgtacccagaaggatgtttatgcagctgtctggatttggttcggtcttgacgcttctggattttcctagtttagcggcgccggttcctcagatgaaggaacctgaagtgatcaggacattgaaactcccgagtggcgtgaggtatcaagagataattgaaggtgaaggacgagaagctcatgaaggggacctggtcgaactaaactatgtgtgtcggcgtgcaaatggatatttcgttcatagcacggtggatcaattcagtggtgaaagctctcctgtcaaacttattctcgatgaaaacgacgtaattgagggcttgaaagaagtcttggtgggcatgaaagctggagggaagcgtagggcactgatacctccatcagtagggtacataaacgagacattgaagccaatccccgaggagtttggaccacgacgcagccttctatcgcatgcgaacgagcctctggtctttgaaatccagctcttgaaagtattatga

SEQ ID NO: 40 - protein, 207 aa, Arabidopsis thaliana
MAMAMEISLPFVGSSMALSAGKSRNSVSRISRVGFSSVSAVHVPRRMFMQLSGFGSVLTLLDFPSLAAPVPQMKEPEVIRTLKLPSGVRYQEIIEGEGREAHEGDLVELNYVCRRANGYFVHSTVDQFSGESSPVKLILDENDVIEGLKEVLVGMKAGGKRRALIPPSVGYINETLKPIPEEFGPRRSLLSHANEPLVFEIQLLKVL

SEQ ID NO: 41 - DNA, 654 bp, Arabidopsis thaliana
atggcgatttctactttaacactcacacaatctctctatacacgttccttcagaccaaccatcttcttttcttcttcttcttcctcgtccttttcgtgtctctgttcttcttcctccgattgcgagccgaaactctccgtcaagaaacgcgttttcggagtgggtttagggttcctagcttcttcgattctctctctaacgcctctggacgcagacgccacgaggattgactactacgccactgtaggagatcctctctgcgaatacagctacgcaaaatcaggacttggattttgcgatctcgatgttggatttggtgatgaagcccctcgtggcgtactcgtcaatatccattacacggcgaggtttgcagatggaacgttgtttgacagtagctataagcgtgcaagaccacttactatgcgaattggagtcggcaaggtaattaggggactagaccaggggattcttggaggcgaaggagtacctcctatgcgagtaggcggaaagcgtaaacttcagattccacctaagttagcttatggaccagagcctgcaggatgcttttctggtgactgcaacatacctggcaatgcaactttgctctatgatatcaactttgttgagatctacccaggaagtaatacaagatga

SEQ ID NO: 42 - protein, 217 aa, Arabidopsis thaliana
MAISTLTLTQSLYTRSFRPTIFFSSSSSSSFSCLCSSSSDCEPKLSVKKRVFGVGLGFLASSILSLTPLDADATRIDYYATVGDPLCEYSYAKSGLGFCDLDVGFGDEAPRGVLVNIHYTARFADGTLFDSSYKRARPLTMRIGVGKVIRGLDQGILGGEGVPPMRVGGKRKLQIPPKLAYGPEPAGCFSGDCNIPGNATLLYDINFVEIYPGSNTR

SEQ ID NO: 43 - DNA, 432 bp, Arabidopsis thaliana
atgtccccatctgaatctgctaagaagaatgagaagataagtgaggaagctacagtggagagtaaagccttttctattagtgttgagaagcaaacgcctgacctagatggcctcattgttgaagagttatgcatgggaaaccccaacggcaagaaagctgagcctggcaaaagggtaagtgtccattatactggaaagcttcaggggaatgggaagattttcgattccaccgttggaaaatcacgttataagtttcgtctagatgctggaaaagtcattaagggattggatgttggccttaatggaatgcttgttggtggcaaaagaaagcttacaattcctccagaaatggggtatggtgcggaaggtgctggtagcattccccctgactcttggctggtctttgatgtcgagctgcttaatgttaaataa

SEQ ID NO: 44 - protein, 143 aa, Arabidopsis thaliana
MSPSESAKKNEKISEEATVESKAFSISVEKQTPDLDGLIVEELCMGNPNGKKAEPGKRVSVHYTGKLQGNGKIFDSTVGKSRYKFRLDAGKVIKGLDVGLNGMLVGGKRKLTIPPEMGYGAEGAGSIPPDSWLVFDVELLNVK

SEQ ID NO: 45 - DNA, 771 bp, Arabidopsis thaliana
atggcgtcaatttcgtcctttggctgcttccctcaatccacagcgctcgccggaacttcctccaccaccagatgccggacgactgtggctgctcgattagctgaccaatcagatgacttcgctcctcttcgttcttctggtgggaattgtggatgtgttaataattctggagagtttgatcgcagaaagttgttggtttcttctgttggtttgttgattggagcattgtcatacgattctaaagatggagactttgcatcagcttctcaatttgctgacatgccagcgcttaaagggaaggattatggcaaaacaaaaatgaagtatccagattatacagaaacacagtctggtcttcagtataaggatttgcgagtaggaactgggcctatagcaaaaaagggagacaaagttgtggttgactgggacggttacacaatagggtactatggacgcatatttgaagctcgcaataaaacaaaagggggttcttttgagggcgatgataaggaatttttcaaatttaccttaggatccaatgaggtgatacctgcttttgaggaggctgtctctgggatggctctcggtggtatcagaaggataattgtaccgccagaactaggatacccggataatgactacaacaagagtgggccgaggccgatgactttctctggacaacgtgcattagattttgtgctgaggaaccaagggctcatagacaagacacttctctttgatgttgaactcctcaaaattgtacccaattga

SEQ ID NO: 46 - protein, 256 aa, Arabidopsis thaliana
MASISSFGCFPQSTALAGTSSTTRCRTTVAARLADQSDDFAPLRSSGGNCGCVNNSGEFDRRKLLVSSVGLLIGALSYDSKDGDFASASQFADMPALKGKDYGKTKMKYPDYTETQSGLQYKDLRVGTGPIAKKGDKVVVDWDGYTIGYYGRIFEARNKTKGGSFEGDDKEFFKFTLGSNEVIPAFEEAVSGMALGGIRRIIVPPELGYPDNDYNKSGPRPMTFSGQRALDFVLRNQGLIDKTLLFDVELLKIVPN

SEQ ID NO: 47 - DNA, 627 bp, Arabidopsis thaliana
atgagctccttggggttttcagttggaacttgttctcctccaagtgagaaaagaaaatgcagatttcttgtgaataatagcttaaacaaagcagaggctattaacttgagaaacaagcaaaaagtttcttctgatcctgagttaagttttgcccaattatcctcatgtggtagaagagaagcaattattggttttggtttctctattggcttgcttgataatgtttctgcattagccgaaacaacttcttgtgaattctctgtgtctccttctggtcttgctttttgtgataaagttgttggttatggtcctgaagctgttaaagggcaactaatcaaggcacattatgtagggaagttggagaatgggaaagtctttgatagtagctataatcgagggaaacctcttactttccgaattggtgttggtgaggtgataaaaggttgggatcaaggaatccttggctctgatggaattcctcctatgcttactggtgggaaacgaacattgaggattcctccagaactcgcgtatggtgatcgaggcgcaggttgcaaaggaggctcatgccttattcctccagcttcggttcttctctttgacattgagtacataggtaaagcttga

SEQ ID NO: 48 - protein, 208 aa, Arabidopsis thaliana
MSSLGFSVGTCSPPSEKRKCRFLVNNSLNKAEAINLRNKQKVSSDPELSFAQLSSCGRREAIIGFGFSIGLLDNVSALAETTSCEFSVSPSGLAFCDKVVGYGPEAVKGQLIKAHYVGKLENGKVFDSSYNRGKPLTFRIGVGEVIKGWDQGILGSDGIPPMLTGGKRTLRIPPELAYGDRGAGCKGGSCLIPPASVLLFDIEYIGKA

SEQ ID NO: 49 - DNA, 1737 bp, Arabidopsis thaliana
atggaagacgatttcgacacgcagaaccagtttccggaagaggagccagaggagatggatatggatctccccgacaatgacgaagctgactctgctccttatctgaaaatcggcgaggaaatggagatcggaaaatcaggattgaagaagaaacttgttaaggaatgtgaaaaatgggacacgcctgagaacggtgacgaagttgaagtgcattacactggaactttgttagatggtaccaagtttgattcgagccgtgacagaggaactcctttcaaatttactcttggccaaggacatgtcattaaaggatgggacttggggatcaagacaatgaagaaaggtgaaaatgctattttcaccattcctcctgagctggcatatggtgaaaccggttcaccgccgactatacctccgaacgctactcttcagtttgatgtggagttgatagcatggaggagtgttaaggatatatgtggtgatggtggtgtgtctaagaaaataattgtggaaggagaaaaatgggagaagccaaaagaccttgatgaagtttacgtcaagtatgaagctcggcttgaggatggcaccattgttggaaagtctgatggtgtagagtttactgtcaaggagggccatttctgtcctgcgctttctaaggctgtcaaaaccatgaaaagaggggagaaggttctcctgactgtgaagccacaatatggatttggggaatttggaagaccagcttctgatggtcttcaagctgcaatcccaccaaatgcaacccttcagattgaccttgagttggtttcttggaagactgtggtggaagtaactgatgacaggaaggttattaagaaaatactcaaggaaggagaaggatatgagcgtcccaatgaaggagcgattgtcaaattgaagttgattggtaaacttcaagatggaacaaccgtgtttgtgaagaaaggtcatgaagaagatgaggagccgttcgagttcaagattgatgaagaacaagtgatagaagggcttgaaaaagctgtgatgggcatgaagaagggtgaggtagcactcatcacaatttcaccggaatatgcttttggttcctctgaatcaaaacaggagctggctgtaataccgccaaactcgactgtatactatgaggtcgagttggtatctttcatcaaggagaaagagtcttgggatatgaacacacaggaaaggatagaagctgcaggcaagaagaaagaagaaggcaatgtgttgttcaaagctggaaaatacgcaagagcttcaaagagatacgagaggggtgtcaaatatatagaatatgactcaactttcgacgaagaggagaaaaagaaatcaaaagatctcaagattgcctgtaacctgaatgatgcagcttgcaagctgaaactgaaagattacaaggaagcagcaaaattgtccacaaaggtgttggagatggatagtaggaacgtgaaggcaatgtataggagagcacatgcctacttggagacggcggatcttgatctggctgagcttgatatcaagaaagctctcgaaatcgatccagacaacaaggaggtgaagatagaatataagaagttgaaggagaaggtgaaagagtataacaagaaagatgctaagttttacagcaacatgttgtcgaaaatgcttgagccacacaaaggaactcagaaggaagcacaagcgatgagtattgacaccaaggcatga

SEQ ID NO: 50 - protein, 578 aa, Arabidopsis thaliana
MEDDFDTQNQFPEEEPEEMDMDLPDNDEADSAPYLKIGEEMEIGKSGLKKKLVKECEKWDTPENGDEVEVHYTGTLLDGTKFDSSRDRGTPFKFTLGQGHVIKGWDLGIKTMKKGENAIFTIPPELAYGETGSPPTIPPNATLQFDVELIAWRSVKDICGDGGVSKKIIVEGEKWEKPKDLDEVYVKYEARLEDGTIVGKSDGVEFTVKEGHFCPALSKAVKTMKRGEKVLLTVKPQYGFGEFGRPASDGLQAAIPPNATLQIDLELVSWKTVVEVTDDRKVIKKILKEGEGYERPNEGAIVKLKLIGKLQDGTTVFVKKGHEEDEEPFEFKIDEEQVIEGLEKAVMGMKKGEVALITISPEYAFGSSESKQELAVIPPNSTVYYEVELVSFIKEKESWDMNTQERIEAAGKKKEEGNVLFKAGKYARASKRYERGVKYIEYDSTFDEEEKKKSKDLKIACNLNDAACKLKLKDYKEAAKLSTKVLEMDSRNVKAMYRRAHAYLETADLDLAELDIKKALEIDPDNKEVKIEYKKLKEKVKEYNKKDAKFYSNMLSKMLEPHKGTQKEAQAMSIDTKA

SEQ ID NO: 51 - DNA, 492 bp, Arabidopsis thaliana
atggcgagcaagatgagtctccgttactctctctttttgatcttcttctctctcatttcactccaaggttttgccaagaagaccggagatgtgtcggaattgcagatcggtgtcaagtttaagccaaaaacatgtgaagttcaggctcacaaaggtgatacgatcaaggtgcactatagggggaaacttactgatggaactgtattcgattcgagttttgaaaggggtgatccgtttgagtttaaattaggaagtggtcaggttatcaaaggttgggatcaaggtttgctaggagcgtgtgtaggtgagaagaggaagttaaagatacctgctaaacttggatatggagaacaaggctctccacctactatccccggtggtgcaacactgatctttgacacagagcttattgcggtaaatgaaaaaccagctggtggtgaagaatacggaggggatgaagatgatgagggatatggaaatgacgagctatga

SEQ ID NO: 52 - protein, 163 aa, Arabidopsis thaliana
MASKMSLRYSLFLIFFSLISLQGFAKKTGDVSELQIGVKFKPKTCEVQAHKGDTIKVHYRGKLTDGTVFDSSFERGDPFEFKLGSGQVIKGWDQGLLGACVGEKRKLKIPAKLGYGEQGSPPTIPGGATLIFDTELIAVNEKPAGGEEYGGDEDDEGYGNDEL

SEQ ID NO: 53 - DNA, 1644 bp, Arabidopsis thaliana
atggagctctgtgttatcagcacgactacgacggtgaaggcaattaatccgtttcttccgtctattacacgtcgtgttagttcccgtctcttccaatcagatagtgtgctacagtttggtgggaggttgaagaaaccaattagcaggcctttggacatgtcttgtgtctctagaaaaattggatttttcggagattttatgtcacatggtggtaattttaggctattcgcggcggcttctccagcggttgaaactagtgtaaaggaagacaaacttccagctgatcttaaggtcacggagactgtacaggcgaattcaagtgtgaaattgagtgtggaagttccagaaattgtctgtgaagattgttaccaacgagtccttaccgaattcatgaaactctcaaaggtgcctggattccgtcctaaaacaagagttccagagaatattattgttggtttcgttgggaggcaatatgttctgagagcaactgttgaatctatcttaaagagaacacttcctcacgccatggaatcagtgactggaagggctttaaaagactcgatacagattgtaagcagttttccagatatggagaaggcttattctaagctcaagactcttagttatgaggtggttgttgatgttgtacctgaactaaaatggaatcctgaggatgggtataaaaatatgaaggtcgttgtagaactaggcgatgagatagatgcaaaaaaagcttgtgaaagacaactaagacagaaatacaagtctcttggtgcgttgaagattgtaaccgagcgagggctacaggtgggagatctagcagttgttgatatttctgctacaactatagatgaggacgggtcaacgggtcaagcgattccagatgctgaaagcaaaggttttcactttgacactgaagaagggaatagattacttcctggattccttgatgcaatcataggaattcgagcaggcgaatcaaagtcattcacgcttgtgtttcctgaatcatggaaacaagaaagtctacgtggccaacgtgctcaattcactgttgactgcaaggaacttttctacagagatttaccaacattagatgactcactcgctgataaattgcttcctggatgcaccactttaaaggaggttgaagaaactctggctaaaagatgtcaagagatggagcaggaagccaaggagcaagcgacagacaacgccatccttgagcagattcgaaagatggttgaagtagagattcctcaatctttatttgaggaacaaggaagacagttttatggagctaggcttctagagattcagggaaacatgaagcttaacgaagaccagttggcttctctttcaagtcaaaaagcagtaaatgagtttctagaaactcaaagagagagcatcaccaacataatcaagcagaatatagctgttggagatatcttcaagcgcgaaaacttagagttctcaacagatgaactagttaaagaggtcgaaaactcgatctcagaattcaagaaacataaacaagagttcgacgaggagcgtgtgaaagatcaggtacaagagattttagaaggagcaaaagtgcttgaatggttaaaagaccgagccgagattcaatacatcactcgttga

SEQ ID NO: 54 - protein, 547 aa, Arabidopsis thaliana
MELCVISTTTTVKAINPFLPSITRRVSSRLFQSDSVLQFGGRLKKPISRPLDMSCVSRKIGFFGDFMSHGGNFRLFAAASPAVETSVKEDKLPADLKVTETVQANSSVKLSVEVPEIVCEDCYQRVLTEFMKLSKVPGFRPKTRVPENIIVGFVGRQYVLRATVESILKRTLPHAMESVTGRALKDSIQIVSSFPDMEKAYSKLKTLSYEVVVDVVPELKWNPEDGYKNMKVVVELGDEIDAKKACERQLRQKYKSLGALKIVTERGLQVGDLAVVDISATTIDEDGSTGQAIPDAESKGFHFDTEEGNRLLPGFLDAIIGIRAGESKSFTLVFPESWKQESLRGQRAQFTVDCKELFYRDLPTLDDSLADKLLPGCTTLKEVEETLAKRCQEMEQEAKEQATDNAILEQIRKMVEVEIPQSLFEEQGRQFYGARLLEIQGNMKLNEDQLASLSSQKAVNEFLETQRESITNIIKQNIAVGDIFKRENLEFSTDELVKEVENSISEFKKHKQEFDEERVKDQVQEILEGAKVLEWLKDRAEIQYITR

SEQ ID NO: 55 - DNA, 339 bp, Arabidopsis thaliana
atgggtgtggagaagcaagtcatcagacccggcaacggtcccaaacccgctccgggccaaaccgtcaccgtccattgcaccggattcgggaaagatggtgatctatcccagaagttctggagtacaaaggacgagggacaaaaacctttctcgttccaaatcggtaaaggtgctgtgatcaaaggatgggatgaaggcgttatcggaatgcaaattggagaggttgctcgcttgcggtgctcatcggattacgcatatggcgctggtggatttccggcatgggggatccagccaaactctgttctcgactttgaaatcgaagtactgagcgtgcagtaa

SEQ ID NO: 56 - protein, 112 aa, Arabidopsis thaliana
MGVEKQVIRPGNGPKPAPGQTVTVHCTGFGKDGDLSQKFWSTKDEGQKPFSFQIGKGAVIKGWDEGVIGMQIGEVARLRCSSDYAYGAGGFPAWGIQPNSVLDFEIEVLSVQ

SEQ ID NO: 57 - DNA, 1554 bp, Oryza sativa
atgcgaggcttcagtatggctgttagctcaatgcaagcaggggagaaagctgtgttcaccatccctccagaattagcaggcaccaagtctcggtgtccagttgatatcccagggaatattgcccccaatgaagcactgcggtttgatattgagctcatctctcttgtcaccataactgacatcctcgatgatgaaggcatactgaaaaagatcatcaagcgtggactggggagcgataagccttgtgatttggatgaagcacttgtgaactacaatgcttgcctggaggatgggatgtcagtgtccatgtctgaaggtattgagttcaaccttgcggaaggcttcttttgtcctgcatttgcacgtgctgtggagactatgacagaaggagaggaagctgttctcattgttaaacctgaatatggttttggtgaacggggtagaccatccataggggatgaagccggtgtgccacctgatgcaactctctatgtgtaccttcaattgatgtcatggaaaacagtgaggcacattggagagaatgggacaatcctcaagaaaaccctttgtagaggaaatttggaaggacagcagacagagaatgaagcagtggtcggagttcgactgattggtaaactgcaagatggggctgtatttgatcagaggggccacgaaggagatgagccgttcaagttcatggttgacgaagagcaggttagcgaaggcctagaggaagctgttcttacaatgcgggagggagaggtctccttgttcaccattcccccccatcgtgtgcaggatcaacttttggttgtccctgttggctcttccgtgacctacgaaatcgagcttgtctcagttgtaaatgacaagcctccccggctcatgagtcaagcagagaccatcgaagctgcagctgaaaaggaaaaggagggagacaaactgttcagctcaagcaaatttttgagagcttacaggagatattacaaggccaggcagatcatactcctgcgctttggacgaggagaaacagatgaagaaattaaacaaatgttgatttcccttaccttcaaagctgctgagtgcgcgaatcagcttcaacgctatgaacaagcataccaccgctatcgtgagatattggagtatgaccctggaaatgtgaaagcacgggaaatgacagggcgggcattccctgaagcatctcttggaatagacactgccgcaatgcataggggcttggatcagccatttaggccgaaagaagagtttcgcgtgtgcggcggctacatgaccccggagttctctgagatgagactgaagcaagggcataaataccatggaagtataaatatttttgtccctcctatcccaagaccagagaccaatgcaaatcaagctgttccagctgctcctacaggccacaggctcacacacagccctactacacctccaggtccaaataatgagaaaagaaacagaagcagtcgtgttccagtcgctgccaggaaggggctagcttcttgcttcagatgcatctcttcagattgtaactga

SEQ ID NO: 58 - protein, 517 aa, Oryza sativa
MRGFSMAVSSMQAGEKAVFTIPPELAGTKSRCPVDIPGNIAPNEALRFDIELISLVTITDILDDEGILKKIIKRGLGSDKPCDLDEALVNYNACLEDGMSVSMSEGIEFNLAEGFFCPAFARAVETMTEGEEAVLIVKPEYGFGERGRPSIGDEAGVPPDATLYVYLQLMSWKTVRHIGENGTILKKTLCRGNLEGQQTENEAVVGVRLIGKLQDGAVFDQRGHEGDEPFKFMVDEEQVSEGLEEAVLTMREGEVSLFTIPPHRVQDQLLVVPVGSSVTYEIELVSVVNDKPPRLMSQAETIEAAAEKEKEGDKLFSSSKFLRAYRRYYKARQIILLRFGRGETDEEIKQMLISLTFKAAECANQLQRYEQAYHRYREILEYDPGNVKAREMTGRAFPEASLGIDTAAMHRGLDQPFRPKEEFRVCGGYMTPEFSEMRLKQGHKYHGSINIFVPPIPRPETNANQAVPAAPTGHRLTHSPTTPPGPNNEKRNRSSRVPVAARKGLASCFRCISSDCN

SEQ ID NO: 59 - DNA, 1959 bp, Oryza sativa
atgccgatctcgcatgagctgggcgagcctgacgaaagcttctacaatctatggaaggaagagtgtgaagaactgtgggaggaagaggacgaactgtggggggacgaagatgttgaggaggagctgtcgctgcgtcaccctggattcaacaagtggaccgtccagcagggtgctgcaggcggggaccatattcgcgccaaggacaagaacttttactgctttgaggtccaagttcacttcactggagaactagttgacggtacgcagttcgtgtcaagccgagaaaatgacattccagagaggtttatactggggcaagaggatgtgatgcatggtttcaacttagctgtcagttcgatgcaaccaggggagaaagctatattcactatcccttcagcgttaaccatgacaaaagctggctcccctgctagcatcccgtcaaacatacctcccaaccaaacactacggtttgagattgagctcatcgccatgtttactataattgacattttcaaagatgaaggcatattgaaaaagattgtcaagaacgcagaacccgacagaaaacaatctcactcaagtgattttgtatttgtgaaatacgacgcatgcctgatggatggaacttcagtgtccaaatctgaaggtgttgaattcagccttaccgacggcttcttctgtcctgcatttgcacatgctgtgcatactatgaaagaaggagaggaagcagtactaattgtgaaaccaaaatatgctttcggtgaacaaggaagaccttctcaaggagaggaagctgctgtgcccccagatgcaactctttatgtgcacctcctatttgtgtgctggatacggcgaattggggaagaccaagcaattgccaagaaaactctaaggatagggaactcacagaggatacacacacaaagtcaagctgtggtgaaagtgcggttgctcggcaaacttcaagatggaactgtttttgatcgtagaggttacggcgacgatgaaccgttcgagttcgtggtagatgaaggtcaagttattgatggcctggatgaatctgtaatgacaatggaggagggagaagttgccgagttcactattccaccccagcacgcatttgatgccgttgggtcagatcagcatcagtttgcctttgtgccgcgcaatgcaaccgtcgtctacaagatcgagctcttgtccgtcgttaatgagaaacatccgttgtacattccgagccgtgatgaaattgttgaatatgcaagtaggaaggaagaggaaggggacatatactttaacttgggtaaacatttgagagctcacaggagatatttcaaggccagacaaatcattgaatattcacgcttcggggtaaggagagggaaaattaatttaataaaactgctgtccatcccaacatcagaaattgatgcacagctggaagaaatgtggatttcctgcacttttaaagcggctaagtgcgcaatccagctagggtgctacatgcaagcatcgtgctattacagcgaggtgctgaactacgatgtggctaatgtgcaagcccagcagcagcaaacgttgttgcaggaatttcctgatggttcctcaagagacccggacgcaatgcagcgaggctttgagcaattcccaccagagtacgagtcagaattgcagctcaatgcaactttcactcctgcagctttttcaccgagacggaaaggtgagcatccgtatcgtggcgaaattattggcttccctgatgttcaggcaaacagcagccagcctgcttctactcctagtactgctcccagtactcccaaccctgctacaccacagacgaacgccctcgctactggcactagtggcaccccgagcggcagcgctgctcaaagctcaggaacaatcaacacgaaccgcgggtttctattcagatgcttcgggccatcgcccacgagctga

SEQ ID NO: 60 - protein, 652 aa, Oryza sativa
MPISHELGEPDESFYNLWKEECEELWEEEDELWGDEDVEEELSLRHPGFNKWTVQQGAAGGDHIRAKDKNFYCFEVQVHFTGELVDGTQFVSSRENDIPERFILGQEDVMHGFNLAVSSMQPGEKAIFTIPSALTMTKAGSPASIPSNIPPNQTLRFEIELIAMFTIIDIFKDEGILKKIVKNAEPDRKQSHSSDFVFVKYDACLMDGTSVSKSEGVEFSLTDGFFCPAFAHAVHTMKEGEEAVLIVKPKYAFGEQGRPSQGEEAAVPPDATLYVHLLFVCWIRRIGEDQAIAKKTLRIGNSQRIHTQSQAVVKVRLLGKLQDGTVFDRRGYGDDEPFEFVVDEGQVIDGLDESVMTMEEGEVAEFTIPPQHAFDAVGSDQHQFAFVPRNATVVYKIELLSVVNEKHPLYIPSRDEIVEYASRKEEEGDIYFNLGKHLRAHRRYFKARQIIEYSRFGVRRGKINLIKLLSIPTSEIDAQLEEMWISCTFKAAKCAIQLGCYMQASCYYSEVLNYDVANVQAQQQQTLLQEFPDGSSRDPDAMQRGFEQFPPEYESELQLNATFTPAAFSPRRKGEHPYRGEIIGFPDVQANSSQPASTPSTAPSTPNPATPQTNALATGTSGTPSGSAAQSSGTINTNRGFLFRCFGPSPTS

SEQ ID NO: 61 - DNA, 1269 bp, Oryza sativa
atgccgatcccggttgatctgggcgagcctgacaacaggaggttcttcgtgtgggtggaagacaatatattgacgatattaccacctgatgccgatgaccatgagtactctggatttaatatgtggaccgtccaaaagccttcagctggctcaaccgccattaacttattatttccaggaggcgcaaccgcagctgaactaatgtacgccgttcctggagcctccaagtgctccaaacccgaggatgatgatgccgtatactgcgtcgaggcccaagttcacttcattggagaacaacttgacggtaccgagttcgtttcaacccgagaaaatggtgttccacaaaggtttatactgggacaagagaatgtgatgcatggcttaagcttggtggtcagcgcaatgcgaccaggggagagagctatattcaccatccctccaaagttagccataaccaagtctggctcccctgccagtattccgtcaagcatacctcccgagcaaacactacggtttgagattgaactcatttcgctgtttgctataactgatatcctcgaaaatggaagcatattgaaaaagatcatcaagcgcccattaccggacaaatctccctccaatcatgcagatactgtaattgtgaattacaacgcatgtctagaagacggaaattcagtttccaaatctgaacgtcttgaattgaaccttgccagtcgtaccggtttcttttgtccagctttgaaatatgctgtgaagactatgagggaaggagaggaagcgatattcattgtaaagccaagatatgctttcggtgctcaaggcagggattctactggagaccaagctgctgtgccccctgatgcaactctttatctgtacgtccagttagctgaacggaagacagctaaacaaaatgaagcagaggaaaaaggaccattcatagatggcccgaatgaagccaagacgacagccagagctcttcccaagcgtcgtcctgtcaagccgggattctccttgcctgtagtacagaatgatagacctacgtatcctggacacgttctcttcgtcccacatgtggtagaagaagaggaggcagatgcaggccaagctgcttcaactactactagtggtcttgctacaccgccaacgactgccgccgatgttggcacgagtgcagccacaaacagcagcgctgctcaaggctcggggatagtcaagacggagacaggtttcctcttcaaacgtttcaggccatggcctgcaaactga

SEQ ID NO: 62 - protein, 422 aa, Oryza sativa
MPIPVDLGEPDNRRFFVWVEDNILTILPPDADDHEYSGFNMWTVQKPSAGSTAINLLFPGGATAAELMYAVPGASKCSKPEDDDAVYCVEAQVHFIGEQLDGTEFVSTRENGVPQRFILGQENVMHGLSLVVSAMRPGERAIFTIPPKLAITKSGSPASIPSSIPPEQTLRFEIELISLFAITDILENGSILKKIIKRPLPDKSPSNHADTVIVNYNACLEDGNSVSKSERLELNLASRTGFFCPALKYAVKTMREGEEAIFIVKPRYAFGAQGRDSTGDQAAVPPDATLYLYVQLAERKTAKQNEAEEKGPFIDGPNEAKTTARALPKRRPVKPGFSLPVVQNDRPTYPGHVLFVPHVVEEEEADAGQAASTTTSGLATPPTTAADVGTSAATNSSAAQGSGIVKTETGFLFKRFRPWPAN

SEQ ID NO: 63 - DNA, 558 bp, Oryza sativa
atgtctgagaccatagatttaaccggagatagatgcattcttaagacagtgatcaggagagcaaaggatgatgctactgcaccttcagatagtcttcccattgttgatgttcactatgaaggaacacttgctgagaacggggaagtgtttgacactactcatgaagacaactccgtcttctcatttgaaattggagagggaactgtcatcaaggcatgggatatcgccgtgaaaacaatgaaggttggagaggttgcaaagatcacatgcaagccagaatatgcttatggagctgcaggttcacctccagagataccgccagatgcaactctcacttttgaggttgagttaatcgcatgcaggccgaggaaaggttctagtgtggaaagtgtatctgaagagaaagctaggcttgaggagttgaagaagcagagggagatcgctgctgcagccaaagaggaagagaagaggaaaagggaggaagcaaaagcagctgcagctgcgcgtgtacaagcaaaacttgaagcaaaaaagggcaagggaaagaaggccaaatag

SEQ ID NO: 64 - protein, 185 aa, Oryza sativa
MSETIDLTGDRCILKTVIRRAKDDATAPSDSLPIVDVHYEGTLAENGEVFDTTHEDNSVFSFEIGEGTVIKAWDIAVKTMKVGEVAKITCKPEYAYGAAGSPPEIPPDATLTFEVELIACRPRKGSSVESVSEEKARLEELKKQREIAAAAKEEEKRKREEAKAAAAARVQAKLEAKKGKGKKAK

SEQ ID NO: 65 - DNA, 477 bp, Oryza sativa
atggggaagcgtcagcagcagcggcggctcgtccgcttcgccgtcgccgccgccgtcgttgtcgcggcggccctcatcctgaccgcttcggccaagaagtccggagatgtcacggagcttcagatcggtgtgaagtacaagccagagtcatgcaccctgcaagctcacaaaggagacaaaatcaaagtgcattatcgtgggtcactcactgatggatcagtgtttgattctagctatgacagaggtgacccctttgaatttactcttggaaacggccaagtgataaaaggttgggaccaagggttactaggtatgtgtgtcggtgaaaagaggaagctaaagatacctgcaaagatgggttatggggagagaggctccccaccgaagattccaggtggagcaacactaatctttgacacggagcttatcgccgtcaatggaaagacaaccggtggtgctagcaatagtgagctctaa

SEQ ID NO: 66 - protein, 158 aa, Oryza sativa
MGKRQQQRRLVRFAVAAAVVVAAALILTASAKKSGDVTELQIGVKYKPESCTLQAHKGDKIKVHYRGSLTDGSVFDSSYDRGDPFEFTLGNGQVIKGWDQGLLGMCVGEKRKLKIPAKMGYGERGSPPKIPGGATLIFDTELIAVNGKTTGGASNSEL

SEQ ID NO: 67 - DNA, 729 bp, Oryza sativa
atgcgcgccatttcggctcttctcctccgtccccttcctccgctggattcctccatggcttcctcttccctcccttctagaaccttctaccgccactcgcttccctcctccgcacctccacctccttcgagaggggcctgcgccgccgcatgctgctgcctccgcgcggccgtctcccggcggcgggcagccgcgcagctgctctccgccgccggattcttgatcgccgtctcgccgccttcgctagccgcgcggaggggccgcatggtcgtgtcgctggaggactacgtcacttcacctgatggcctgaagtactatgatcttgttgaagggaagggtccaactgctgaaaagggctcaactgtgcaggtccattttgattgcatataccgtggcatcaccgctgtgtcaagccgcgaagccaaactactggcagggaaccggagtattgcgcagccttatgagttcagtgtcggatcgctgcccgggaaagagcgaaagcgggaatttgtagacagtgccaatgggttatactcagcacaggcgtcaccgaaacctcctgccgcaatgtacacaataactgaagggatgaaagtggggggaaagaggagagtaattgtccctccagagctcggatatgggaaaaaggggatgaatgagataccgcctgatgctccttttgaactcgatatagagcttttggaagttgtccctcctgcagagaaatga

SEQ ID NO: 68 - protein, 242 aa, Oryza sativa
MRAISALLLRPLPPLDSSMASSSLPSRTFYRHSLPSSAPPPPSRGACAAACCCLRAAVSRRRAAAQLLSAAGFLIAVSPPSLAARRGRMVVSLEDYVTSPDGLKYYDLVEGKGPTAEKGSTVQVHFDCIYRGITAVSSREAKLLAGNRSIAQPYEFSVGSLPGKERKREFVDSANGLYSAQASPKPPAAMYTITEGMKVGGKRRVIVPPELGYGKKGMNEIPPDAPFELDIELLEVVPPAEK

SEQ ID NO: 69 - DNA, 642 bp, Oryza sativa
atggtcagtctgtccgccgccgtcgctccggccgccggcgtcgtgccgccgcctcaaaaagcccaagctttcgccgtagccgaagcgcatgccccgaccatcccaagaaggcacctcctcctcgcctctgctgcctccacactgcccgcggccgcggccgcggcctctgcctctgccgccgccgcccctagcttcgccgagatccccggctccggcggcgtgaaggccctagacctccgggagggtcccggcgaggtcccggccgacggcgaccaggttgcaatccattactatggaagattggcagcgaagcaaggatggcgctttgattccacctatgatcacaaggacgagaccggtgatccgatgccgtttgtattcaccgtcggagctggaaatgttatacctggtattgaagcagcagtgaagtccatgagagttggtggtcttcgccgtgtcatcattccaccgtcacagggatatcagaacacatcacaagaacccattcctcctaatttctttgatcggcagagattatttactactatatttaacccaacacgtctggcaaatggcgagggttccactctcggtacactcatcttcgacatcgagctaatcagcataaggcagcattcataa

SEQ ID NO: 70 - protein, 213 aa, Oryza sativa
MVSLSAAVAPAAGVVPPPQKAQAFAVAEAHAPTIPRRHLLLASAASTLPAAAAAASASAAAAPSFAEIPGSGGVKALDLREGPGEVPADGDQVAIHYYGRLAAKQGWRFDSTYDHKDETGDPMPFVFTVGAGNVIPGIEAAVKSMRVGGLRRVIIPPSQGYQNTSQEPIPPNFFDRQRLFTTIFNPTRLANGEGSTLGTLIFDIELISIRQHS

SEQ ID NO: 71 - DNA, 636 bp, Oryza sativa
atggcgcccgcgtcgctgacgagattgaccaacccgttgccgtgcgcctctccatctccaagatgccggcgccggccggggagatctccgccggcgagggcggcggcgtgcggggtggtttccaggaggagggcggtgtcggagatggcgattcttggcggcgccgccgcggccgcggcctcctgctgcgtcgatctcttcttcgcccacatgcctgcccgtgccgccacgctggagcctgatgtgatcaggtacagaaagctggacagtggagtgaagcttgaagatgttgtggatggcgagggtccagaagcacgtgaaggagatgtcgtgcaattcaactatgtgtgccgccgcgcaaatggttatttcgtgcatagcacggttgaccagtttagcggcgagagtaagccggtcacacttgcacttgatggaaaagagatgattcgaggtctcaaagacgtcatcgttggaatgaagacaggaggtaagaggagagctctgatacctcctcaagtaggttacactgatgagagcttgcagcccataccagaagagttcggtccacggcgaagcctcctgtcacatgccaaggagcctctggtgtttgaggttcagctgctcaaggtcctctga

SEQ ID NO: 72 - protein, 211 aa, Oryza sativa
MAPASLTRLTNPLPCASPSPRCRRRPGRSPPARAAACGVVSRRRAVSEMAILGGAAAAAASCCVDLFFAHMPARAATLEPDVIRYRKLDSGVKLEDVVDGEGPEAREGDVVQFNYVCRRANGYFVHSTVDQFSGESKPVTLALDGKEMIRGLKDVIVGMKTGGKRRALIPPQVGYTDESLQPIPEEFGPRRSLLSHAKEPLVFEVQLLKVL

SEQ ID NO: 73 - DNA, 2049 bp, Oryza sativa
atggacgacgacgacctcggctacccgcccggcatggccggcctggacgcgatggccggcctcggtggcctcggcgggatgggcggcctcggtgggctcggcgggatgggcggccttggtgggctcggcgggatgggcggcctcggcggactgggcggcttcggcggcgggggcatggaggacctgtacggcggcgggggaggtgcggggggggaggagggaggggaggggccgtacgcggcggagatggaggtcggggaggagaaggagatcgggaaggaggggctcaggaagaagctggtgaaggagggcgaggggtgggagcgccccgacgccggcgacgaggtccaagtgcactacacggggacgctgttggatggcaccaagttcgattccagccgggatcgcgatgctccgttcaagttcaccctgggccaaggccaagttattaagggatgggatttgggcattaagaccatgaagaaaggtgagaatgctattttcaccattccaccagagcttgcatatggtgaggatggctcccctccagttatccctccaaatgccacgctgcagtttgatgtcgagcttatctcctgggaaagtgtcaaggacatttgcaaggacggtggcatcttgaagaaggtactagctgaaggcacgaagtgggagaacccaagagaccgcgatgaagtttttgttaagtatgaggtgaggcttgaggatgggactgttgtagcagaatctgatggtgtcgagttcaccgtgaaagatgggcatttctgtcctgccatatccaaggctgtgaagactatgaagaagaatgagaaggccctcctcacagtcaaaccacaatatggcttcggtgagcaaggcaggccagccgctagagatgaagctgcaataccccctaatgctacattgcacattaatcttgaattggtgtcctggaaggcagtcactgagattggtaatgataagaaaatcctcaagaagatcctccatgagggtgaaggctatgagcgtcccagtgattgcacacttgtcagagtgaaacttattggaaagttagaggatggtaccatatttgtcacaagaggtcatgatggtgacgagccattcgagtttaagactgatgaagaccaagtggttgaagggcttgacaaagcagtacttagcatgaagaaaggagaagttgcattggtgactattccaccagagtatgcgtttggatctgatgaaacaagacaagatttgtctgttgtccctcctaattcaactgtttattatgaggtggagcttgtgtccttcgataaggagaaagaatcatgggacatgaaggagaatactgagaagattgaagcggctgcaaagaagaaagatgaagggaatgcttggtttaagatggaaaagtatgccagggcttctaagagatatggaaaggctttaaacttcatccagtatgacagctccttcagtgaagaagagaagcagctgtccaaaccactcaaggtgagttgcaagctcaacaatgctgcatgtaagctgaagcttaaagactacaaggaagcaaaggaactgtgtactgaggtcctggagcttgacagcatgaatgtgaaggctttttacagaagggcacaggcacacatgtatcttgttgactttgatttggcagaactggatatcaagaaagcactagaaatagatccagacaacagggatgtgaagatggggtacaggaggctgaaggagaaggtcaaggagcagaagaggaaggaaacgaaattgtacggcaacatgatttcgaagctaagcaagcttgaagactcggaaaccgaaggaggcacaactcaggcgccaagcaagaagcatggcctatggccactcaccgcgctgctgagaaggctgttcacgaggagtgacggtagcaaggagtcgatgctgtggctggtgctgaggctgctcattccggtggtgctgctggtggcggtctgtgtggctttctacatgcgcagcggacctcctgaagtagactgcatcaactgttaa

SEQ ID NO: 74 - protein, 682 aa, Oryza sativa
MDDDDLGYPPGMAGLDAMAGLGGLGGMGGLGGLGGMGGLGGLGGMGGLGGLGGFGGGGMEDLYGGGGGAGGEEGGEGPYAAEMEVGEEKEIGKEGLRKKLVKEGEGWERPDAGDEVQVHYTGTLLDGTKFDSSRDRDAPFKFTLGQGQVIKGWDLGIKTMKKGENAIFTIPPELAYGEDGSPPVIPPNATLQFDVELISWESVKDICKDGGILKKVLAEGTKWENPRDRDEVFVKYEVRLEDGTVVAESDGVEFTVKDGHFCPAISKAVKTMKKNEKALLTVKPQYGFGEQGRPAARDEAAIPPNATLHINLELVSWKAVTEIGNDKKILKKILHEGEGYERPSDCTLVRVKLIGKLEDGTIFVTRGHDGDEPFEFKTDEDQVVEGLDKAVLSMKKGEVALVTIPPEYAFGSDETRQDLSVVPPNSTVYYEVELVSFDKEKESWDMKENTEKIEAAAKKKDEGNAWFKMEKYARASKRYGKALNFIQYDSSFSEEEKQLSKPLKVSCKLNNAACKLKLKDYKEAKELCTEVLELDSMNVKAFYRRAQAHMYLVDFDLAELDIKKALEIDPDNRDVKMGYRRLKEKVKEQKRKETKLYGNMISKLSKLEDSETEGGTTQAPSKKHGLWPLTALLRRLFTRSDGSKESMLWLVLRLLIPVVLLVAVCVAFYMRSGPPEVDCINC

SEQ ID NO: 75 - DNA, 693 bp, Oryza sativa
atggcgcctcctcctatctcctcctccctctcgctcatggcctccaacccaatcccgtcgcctccggtcgccaaaccgggcaggccgctcaccgtcgcggcgtgcagcaacagcagcagcagctcctcctcctcctccccgtcgtcgacctcgtgctcggctgcctggagtctcccggtggcgacgtcggccggcaggagggggctgctcgcgctgggcgcggggttcctggcttcccctgggcttctgtgccccgccggcgacgccggagcgacgcgcatcgagtactacgcgacggtgggggacaagctgtgcgacatgaacgtcgtcaagtcggggctcggctactgcgacgtcgaagtcggcaccggcgcccagcccccgcgcggccagctcataaatgtacactacactgcaagatttactgacgggatagtgttcgacagcacctacaagcgaggacggccactgacaatgcgccttggcgcaggcaagatcctccgagggcttgaacagggaatcagtggtggcggtggtgtgccacccatgctcgttggtggaaagcgcaagcttatgatacctgcaactttggcatacggacctgaaccagcaggttgcttctcaggagactgtaatattcccggcaacaccacactcctatacgacatcttcctggttggattttacaagtga

SEQ ID NO: 76 - protein, 230 aa, Oryza sativa
MAPPPISSSLSLMASNPIPSPPVAKPGRPLTVAACSNSSSSSSSSSPSSTSCSAAWSLPVATSAGRRGLLALGAGFLASPGLLCPAGDAGATRIEYYATVGDKLCDMNVVKSGLGYCDVEVGTGAQPPRGQLINVHYTARFTDGIVFDSTYKRGRPLTMRLGAGKILRGLEQGISGGGGVPPMLVGGKRKLMIPATLAYGPEPAGCFSGDCNIPGNTTLLYDIFLVGFYK

SEQ ID NO: 77 - DNA, 339 bp, Oryza sativa
atgggcttcgagaagacgatcctgaaagccggcaccggtcccaagcccgtcaagggccagaaggtcaccgtccactgcaccggcttcgggaaagataatgatctcgctaagaagttttggagcacaaaggacgcaggccaggagccattcagtttcaatataggccagggttcggtgatcaaaggatgggacgagggagttatgaccatgcaagtgggtgaagttgctcgtattcagtgcaccccggattatgcgtatggagctagtgggtttccggcctggggaattcgaccaaactcagtgctggtgttcgagattgaggttcttagcgcccagtaa

SEQ ID NO: 78 - protein, 112 aa, Oryza sativa
MGFEKTILKAGTGPKPVKGQKVTVHCTGFGKDNDLAKKFWSTKDAGQEPFSFNIGQGSVIKGWDEGVMTMQVGEVARIQCTPDYAYGASGFPAWGIRPNSVLVFEIEVLSAQ

SEQ ID NO: 79 - DNA, 1899 bp, Oryza sativa
atggcgcacgcggatgcggacgccggggacctccccccgccccccgcgaagaagaagaagtctcccaccgaggaggaggcggagaagaggaggaagaagcttactccggggagcttgatgaaggggcttattcggtctggtgggggtgacgcgacccctgcggagggagatcaggttatagttcattgcacgactcggacaatagatggcatcattgtcaattctacaagaagggagcatggaggtaaaggggtcccgctcaggtttgtcttggggaagagcaaaatgatccttggctttgctgaaggctttccaacaatgctgatgggtgaaattgcgatgttcaaaatgaagcctcagatacactatgcagaggaggattgtccagttacagctcctgacggctttccaaaagatgatgaacttcaatttgagattgagatgttggatttcttcaaagccaaaattgtggctgaggacttaggggttgtaaagaagataattgatgaaggcaaggggtgggaaacaccgagggagccatatgaagtgacagcacggataactgcaagaacaggagatggcaaagaacttcttcccagtaaagaagaaccctatttctttactattggtaaatctgaggtacctaaagggcttgaaatgggaattgggtcaatggcacgtgaggaaaaagcaattatttatgttacaagtgcctatttgacaaactcttcactaattccgcaacttgaaggtattgaagaagttcaatttgaagttgaactggttcagtttgttcaggtgagggatatgcttggcgatggccgcctcataaaacggcgtgtagttgatggaaaaggtgaatttcctatggactgtcctcttcatgatagcttgctaagagtgcattataaagggatgctccttgatgaaccaaagtcaatattttatgatacccgagttgataatcatggtgaaccattggagttctgttctggagaaggcctggtacctgaaggatttgaaatgtgcgttcgactaatgcttcctggtgaaaaatctattgtgacctgccctccagattttgcatacgataaatttccaaggccagcgaatgttcctgaaggagctcatgttcaatgggaaattgaattacttggatttgaaatgcccaaggattggactggtttcaccttccaagaaatcatggatgacgcagaaaaaataaaaaccacgggtaatcgactgtttaaagaagggaagtttgagctagctaaggcgaagtatgaaaaggtgcttagagagtacaaccatgtgcatcctcaagatgatgatgaggggaaaatctttgctaattcaagaagttctctacatctaaatgtagctgcttgctaccagaagatgggtgagtatagaaaatctattgacacatgtaacaaggtgctagaagcaaaccctgtgcatgtgaaggctctttatcgccgaggtatgtcctacatgttattgggggactttgatgatgcaaagaaggattttgagaagatgatagctgtcgacaagtcctcagagcctgatgctacagctgcccttaataaacttaaacaaacaattcaggaaactgaaaagaaagcgaggaagcagttcaaagggctgttcgacaagaagccaggcgagatttccgaagtaggtgtaggagagccagagggcaacaagactgacacgacaggctcaggcgaggcagcgtcaactgctgacagagacacggatgcaaaggaggctattccccgtgcagattcagggttggccttcgaggaagagaggcccggacttctcgcccgcatctggccttcagcgagtcggatcttctcctcgcttgggctcaacaggtgcacaatcctctga

SEQ ID NO: 80 - protein, 632 aa, Oryza sativa
MAHADADAGDLPPPPAKKKKSPTEEEAEKRRKKLTPGSLMKGLIRSGGGDATPAEGDQVIVHCTTRTIDGIIVNSTRREHGGKGVPLRFVLGKSKMILGFAEGFPTMLMGEIAMFKMKPQIHYAEEDCPVTAPDGFPKDDELQFEIEMLDFFKAKIVAEDLGVVKKIIDEGKGWETPREPYEVTARITARTGDGKELLPSKEEPYFFTIGKSEVPKGLEMGIGSMAREEKAIIYVTSAYLTNSSLIPQLEGIEEVQFEVELVQFVQVRDMLGDGRLIKRRVVDGKGEFPMDCPLHDSLLRVHYKGMLLDEPKSIFYDTRVDNHGEPLEFCSGEGLVPEGFEMCVRLMLPGEKSIVTCPPDFAYDKFPRPANVPEGAHVQWEIELLGFEMPKDWTGFTFQEIMDDAEKIKTTGNRLFKEGKFELAKAKYEKVLREYNHVHPQDDDEGKIFANSRSSLHLNVAACYQKMGEYRKSIDTCNKVLEANPVHVKALYRRGMSYMLLGDFDDAKKDFEKMIAVDKSSEPDATAALNKLKQTIQETEKKARKQFKGLFDKKPGEISEVGVGEPEGNKTDTTGSGEAASTADRDTDAKEAIPRADSGLAFEEERPGLLARIWPSASRIFSSLGLNRCTIL

SEQ ID NO: 81 - DNA, 759 bp, Oryza sativa
atggccaccttccttgggagctcgccggccttcctcgcccgccccgtcgccgccaagccgcacctctcctgcgcgcagtcgccgcgcccgcccagcgcccagccgccgccggagcagcaaccgccgacgccgacgccgacgcagcagcagtccatgcaagcccagccgcaggcgaggccgaggcgcgcgccggcggcggcggcgtccggcgcggactcgacggactgggtggcgacgtcgctgacgcggcggttcggcatcggcgccgggctcgcgtgggtcgggttcctcgccttcggcgtcgtctccgagcagctcaagacccgcttcgaggtcgcgcagcagctggccaacaccaaggacgtggagcaagagcaggaggtcgtccttcccaacggaatacggtactacgagatgcgagtaggcggcggcgacgtgccgcggccgggggacctggtggtgatcgacctgaaggggagggtgaccggcggcgaggcgttcgtggacacgttcggcgacgggaagcggccgctggcgctggtgatggggtcgaggccgtacacgaggggaatgtgcgagggggtggagtacgtgctgcggtccatgagggccggcggcaagcggcgggtggtcgtcccgccggcgctcggcttcggcgacgacggcgccgacttcggcgacgccgccgcgcaggtcccgcccggggccacgctcgagtacgtcgtggaggtcgacaaggtgtccatcgcgccggcgtga

SEQ ID NO: 82 - protein, 252 aa, Oryza sativa
MATFLGSSPAFLARPVAAKPHLSCAQSPRPPSAQPPPEQQPPTPTPTQQQSMQAQPQARPRRAPAAAASGADSTDWVATSLTRRFGIGAGLAWVGFLAFGVVSEQLKTRFEVAQQLANTKDVEQEQEVVLPNGIRYYEMRVGGGDVPRPGDLVVIDLKGRVTGGEAFVDTFGDGKRPLALVMGSRPYTRGMCEGVEYVLRSMRAGGKRRVVVPPALGFGDDGADFGDAAAQVPPGATLEYVVEVDKVSIAPA

SEQ ID NO: 83 - DNA, 1758 bp, Oryza sativa
atggcggacgacgcgtacgacgacctcccaatggccggcgcggaggaggaggtggacgacgtgatgaaggacgagctcgacgaggagggggactcctcctcccccgtggcaatgaaggtcggggaggagaaggagatcgggaagcaggggctcaggaagaggctcctcaaggaaggggaaggatgggatcgccccgaatccggcgacgaggtccaagttcactacaccggcactctcctcgacggaaccaagttcgattccagccgcgatcgtggaacccccttcaaattcagcctcggccaaggggaggtgatcaaggggtgggatgagggtatcaagacgatgaagaagggggagcaggcggtgttcaccgttccgccggagctcgcctacggcgaggccggctcgccgccggcgatcccgcccaacgccacgctgcggttcgacgtcgagctgctctcctgggccagcgtcaaggacatctgcaaggacggcggaatcttcaagaaggtgctcgccgagggacacaagtgggagaatcccaaggacctcgacgaggtgctcgtcaagtacgaagcgaggctcgaagacggaactgtggtatcgaaatctgacggtgttgagtttgctgtcaaagatggctatttctgcccggcgctttcaaaggctgtcaagacgatgaagaagggcgagaaggtcctcctcactgtcaagccacaatatggctttggtgagcaaggcaaaccagcttctggagctgaagctgctgtgccgccaaatgctaccctgtacgtcgatcttgagttgctctcctggaagacggtcactctgatcggcgacgataagcgcatcctgaagaaagtcctcaaggaaggggagggctatgagcgccctaacgatggagcagtagttagagtgagatttatcggcaagttggaggacggcactgtgttttccaagaaagggcatgatggtgatgagccatttgagttcaggacagatgaggagcaagtcatcgaagggctggacagaactgtggtcaccatgaagaaaggagaggttgcattggtgagattaccacctcaacatgctttcggatccactgagactaagcaggatcttgctgttgttcctgcaaactccacagtctggtatgaagttgagcttgtctcattcgagaaggagaaagaatcatgggatttgaaggacaatgctgagaagattgaagcagctgccaagaagaaagatgaagggaatgtgtggttcaagatgggcaagtatgctaaggcctccaagagatacgaaaaggctgcgaagtacatcgagtatgacagctccttcactgatgatgagaagaagcaatcgaaagcactcaaggttagttgcaagctcaacaatgctgcttgcaaactgaagctgaaggaatacagggaagcagagaagctctgcaccaaggttttggaactggagagcacaaatgtaaaggccttgtacagaaggacgcaggcatacattgagcttgctgatctggaactagcagagttggatgtcaagaaagcactggagattgatcctgacaacagggatgtgaagatggtgtataagacattgaaggagaagatcaaggagtacaacaagagagacgccaagttctacggcaacatgttcgcgaaatggaggaagctggaacacatggagaacaagaaggtgcctgggaagcaggaggcacagcctatggccattgacagtgccgcttga

SEQ ID NO: 84 - protein, 585 aa, Oryza sativa
MADDAYDDLPMAGAEEEVDDVMKDELDEEGDSSSPVAMKVGEEKEIGKQGLRKRLLKEGEGWDRPESGDEVQVHYTGTLLDGTKFDSSRDRGTPFKFSLGQGEVIKGWDEGIKTMKKGEQAVFTVPPELAYGEAGSPPAIPPNATLRFDVELLSWASVKDICKDGGIFKKVLAEGHKWENPKDLDEVLVKYEARLEDGTVVSKSDGVEFAVKDGYFCPALSKAVKTMKKGEKVLLTVKPQYGFGEQGKPASGAEAAVPPNATLYVDLELLSWKTVTLIGDDKRILKKVLKEGEGYERPNDGAVVRVRFIGKLEDGTVFSKKGHDGDEPFEFRTDEEQVIEGLDRTVVTMKKGEVALVRLPPQHAFGSTETKQDLAVVPANSTVWYEVELVSFEKEKESWDLKDNAEKIEAAAKKKDEGNVWFKMGKYAKASKRYEKAAKYIEYDSSFTDDEKKQSKALKVSCKLNNAACKLKLKEYREAEKLCTKVLELESTNVKALYRRTQAYIELADLELAELDVKKALEIDPDNRDVKMVYKTLKEKIKEYNKRDAKFYGNMFAKWRKLEHMENKKVPGKQEAQPMAIDSAA

SEQ ID NO: 85 - DNA, 1578 bp, Oryza sativa
atgtcgtcgttttggggcgcggaggtgaagcccgggaagccctacacccacacccacatcccgcgcctcggccgcctgcgcctcacccaggcgacgcttggaggggaggctgggaaggtggagaagggcggcggtgggaagaagaacgtggtgcagttacagtgcactgtgaagaacaaggatcccgtgttcctgtgtgccctggtgccggggcagtcggagacttgccacctggagctcgagttcgaggagaagcacgtcacgttctcggtgctcgggccgaggagcgtccacctcgctggatactacattggtgatgtgtatggggaggagatagatgacagtgatactggtagtgactctctgcaaggctcagatgatgatgcttttctggatactgatgatgatgacagtggcgctgatgatggcactgttctcatcccattatctcctggaaactcagatggtgaagatgatgattcagagtatgactcagaggatgatgactcagagatgatatacaatcagcgtagaggcaaaagttcagttgttattgaggaaattcaagaggatgacaagcctgctgctggtggagcacaaaagggatcaaacaagaagcaaaccagcgaaaatggtgatgattctaaactgcagcttgttgttaggactccacctgctgaatctttggaaagcgaagatgaagatggctttcctgtatcattttctgaatcaaagaaaagaactgatggtagttctaagaaaaaaggcaacctaaacaacaagatgagcactgaagataggaaaaggaaaagcagtgctgttggcgaccatcatgacccttcaggggaagtaaaggatgaaaatgatggagtgtcaaagaaaaataaaaaggccaaggccaaaaagactgctgtgggcggtgtggaaaaggagatcaaacaggaagattctccagctgatcttgttgatgcaaaacaaaagaaaaacaagaacaaaaatacctcagaagcagaagctggtgctcatcagaataccgataagacaaaacatatccacactgatgctgaggaagacactgcacaggaggctagcaaaaagaaaaagaacaagaaaaagaagacacaggagaagaatgaaagtgagaaccagacaccaaaaacacaggagaagaatgctaaaggaaaccagacatcaaatacagatcttacggggtcagagagcaagaagcagccgctccaaacacgcacttttggcaatggtatgataattgaggagatagaaatgggcaaaccagatggtaaaaaagcctctcctgggaaaaaggtttctgttaaatacattggcaagctaaagaatggcacaatttttgactctacggttggtcgaagggcatttgattttagactcggtattggggaggtcattaagggctgggatataggcatcaatggtatgcgtgttggggacaaaaggaggctcacgatcccaccatcaatggggtatggaaacaaaagaatggggccaataccgcagaactcaaccctcgtgtttgatgtggaactcgtgaatgtaaagtga

SEQ ID NO: 86 - protein, 525 aa, Oryza sativa
MSSFWGAEVKPGKPYTHTHIPRLGRLRLTQATLGGEAGKVEKGGGGKKNVVQLQCTVKNKDPVFLCALVPGQSETCHLELEFEEKHVTFSVLGPRSVHLAGYYIGDVYGEEIDDSDTGSDSLQGSDDDAFLDTDDDDSGADDGTVLIPLSPGNSDGEDDDSEYDSEDDDSEMIYNQRRGKSSVVIEEIQEDDKPAAGGAQKGSNKKQTSENGDDSKLQLVVRTPPAESLESEDEDGFPVSFSESKKRTDGSSKKKGNLNNKMSTEDRKRKSSAVGDHHDPSGEVKDENDGVSKKNKKAKAKKTAVGGVEKEIKQEDSPADLVDAKQKKNKNKNTSEAEAGAHQNTDKTKHIHTDAEEDTAQEASKKKKNKKKKTQEKNESENQTPKTQEKNAKGNQTSNTDLTGSESKKQPLQTRTFGNGMIIEEIEMGKPDGKKASPGKKVSVKYIGKLKNGTIFDSTVGRRAFDFRLGIGEVIKGWDIGINGMRVGDKRRLTIPPSMGYGNKRMGPIPQNSTLVFDVELVNVK

SEQ ID NO: 87 - DNA, 561 bp, Oryza sativa
atggcagaggttgcagatttaactggggatggaggtgttcttaagacggtggtcagaaaagcaaaggatgatgctatagctccaactgatagtcttcccttggttgatgttcattatgaaggcacactcgctgaaaatggtgaagttttcgacaccactcatgaagacaactctattttctcatttgaaattgggcaaggagctgtcattaaagcatgggatatagctttaagaactatgaaggttggtgaagttgcaaaaataacatgcaagccagaatacgcatacggaagtgcagggtcgccgccagagattccacccaatgcaacactcatttttgaggtggagttagtggcttgtaggcctaggaaaggttcaagcctgggcagtgtttctgatgagaaagccaggctagaggaactaaagaagcagcgagagctagctgctgccaccaaggaggaagagaaaaagaagagggaagaagcgaaggctgctgcagcagctcgtgtccaagccaaacttgacgcgaagaaggggaagggaaaaggaaagggaaaatag

SEQ ID NO: 88 - protein, 186 aa, Oryza sativa
MAEVADLTGDGGVLKTVVRKAKDDAIAPTDSLPLVDVHYEGTLAENGEVFDTTHEDNSIFSFEIGQGAVIKAWDIALRTMKVGEVAKITCKPEYAYGSAGSPPEIPPNATLIFEVELVACRPRKGSSLGSVSDEKARLEELKKQRELAAATKEEEKKKREEAKAAAAARVQAKLDAKKGKGKGKGK

SEQ ID NO: 89 - DNA, 1614 bp, Oryza sativa
atggagctcgccaccgccaccgccgccgccgccgcctcctccaccacccgtgctcaccgaccccgcagctccaggctcgcagtcccgacgagggacagctgctccctcctcccctcctcttcctcccgccagttcgccgcgctctccacgtcggcggcctccaccgcctcgcggtcacgggcgcagaggcggcggctccccgtcgcctcggccgccgtcgagctccgggaggcctcgtcgcagggcggagactccgtccgcgtcaccgagacgctgcagcccggctccagtgtcaagttcagtgtggaggtgcctccttccatatgccagcaatgctatgaaactactctacaagagtacgcaaagcgcttcaagattcctggatttcgtcccgggaaagtagttccagagaacgtacttataaactatgtaggaccaaaacacgtacaggatgctacagttgaagctatcttgaggcatacacttcctcaagcattgtcctcggtagaggacagggcattagaagattctgtacgcattctaacaaagtttgaagatatggcaaattcattctctcttgataatgtgtttagatatgatgtttctgtggatgttgcccctgaagtgagatggttatctgaagataaatataagaacctcaaagtggtcgttgaaatagatgaaattgttgatgctgaaaaggcagctgagatagaacttaaacgtcgtcataaagctctaggattactccgaatagttgctgacagaggactgcaggtaggtgatctggtggtactagatatatttgcagaaagtattaccagtgatggctctaaaggtgaaaaaattccatcagctgagagtaaaggtttccacttggacactgaggaaaacaataaccttgttcctggttttcttggttcgttaattggtattcgtcctggtgagactagatcatttcctcttcaattccctgagtcctttgaacaagaaagtctgcaaggtgtccgtgctcaatttactgttgtgtgcaaagagctcttctacagagagttgccagaattggatgactcacttgctggaaagctccttccaggctgcactaccatggatcaggttcgagaacgcattttgcaaagatgtaaagaagtggagaaaacagcaatagaacaagcaacagataatgcaatccttgatcagcttggaaagttagttgaagttgatgttccacgagccttatttcaagaacaaggccagcagttgtatggagccaaacttctacaactccaggcagaaaggaagctagataaagaccagctggcatccctttcaagccaaaagtcagttcaggaatacctagaaagtgagagagaaaatattaatagaatcattaaacaaatgttggctgttggtgaaatattcaaggctgaaaatctgcagttttcgaccgagcaactggtaaaggaagttgagaactctatagaagagttcaaacactataatcaagactatgatgaggggagcatcaagcagcaggttcaggatgttctagaggcagcgaaggtgctcgaatggctcaaggagaactgcattattgagtacattagaccatga

SEQ ID NO: 90 - protein, 537 aa, Oryza sativa
MELATATAAAAASSTTRAHRPRSSRLAVPTRDSCSLLPSSSSRQFAALSTSAASTASRSRAQRRRLPVASAAVELREASSQGGDSVRVTETLQPGSSVKFSVEVPPSICQQCYETTLQEYAKRFKIPGFRPGKVVPENVLINYVGPKHVQDATVEAILRHTLPQALSSVEDRALEDSVRILTKFEDMANSFSLDNVFRYDVSVDVAPEVRWLSEDKYKNLKVVVEIDEIVDAEKAAEIELKRRHKALGLLRIVADRGLQVGDLVVLDIFAESITSDGSKGEKIPSAESKGFHLDTEENNNLVPGFLGSLIGIRPGETRSFPLQFPESFEQESLQGVRAQFTVVCKELFYRELPELDDSLAGKLLPGCTTMDQVRERILQRCKEVEKTAIEQATDNAILDQLGKLVEVDVPRALFQEQGQQLYGAKLLQLQAERKLDKDQLASLSSQKSVQEYLESERENINRIIKQMLAVGEIFKAENLQFSTEQLVKEVENSIEEFKHYNQDYDEGSIKQQVQDVLEAAKVLEWLKENCIIEYIRP

SEQ ID NO: 91 - DNA, 657 bp, Oryza sativa
atggctccctccgccgccgccgccgccgccgccgccgccgccgccgccaccgcctcgccgctgtcccgtctcctgctcagcctcccaaaccccagcgtgaaacttcccgtgtcttctccgagccggaacgccggcgccgccgtggccgccaagaacagcacccccgtcgtcgccctccgccggcgcgaggccgtggccgccgtgctgtccgcatccatcctctcccgcgtgctccccgcggcggcggaagcgtccggcggcgagtgcccgctcgaggtggcgcccaacggtctcgccttctgcgaccgcgttgtcggcaccggcgccgccgccgagcaagggcagctcatcaaggcgcattacaccgggaggctggaggacggcacggtgttcgacagcagctacaagcgcgggaagccgctcaccttccgcgtcggcgtcggcgaggtgatcaaaggatgggaccagggcatagtgggcggcgaagggatcccgccgatgctcgccggtggaaagaggtcgctgaggctgccgccggagctggcctacggcgcgagaggagccgggtgcagaggctgggagcccacctcctgcgtcatcccgcccaactccactctcctcttcgacgtcgagtacgtcggcagagcagtcggatga

SEQ ID NO: 92 - protein, 218 aa, Oryza sativa
MAPSAAAAAAAAAAAATASPLSRLLLSLPNPSVKLPVSSPSRNAGAAVAAKNSTPVVALRRREAVAAVLSASILSRVLPAAAEASGGECPLEVAPNGLAFCDRVVGTGAAAEQGQLIKAHYTGRLEDGTVFDSSYKRGKPLTFRVGVGEVIKGWDQGIVGGEGIPPMLAGGKRSLRLPPELAYGARGAGCRGWEPTSCVIPPNSTLLFDVEYVGRAVG

SEQ ID NO: 93 - DNA, 714 bp, Oryza sativa
atggacttggtgcgcgcgctcgccgccatcccggctcgtcaccctctccctccctcctcgctgacaaaggctcgccgccatgggcctcaaccatcgacgaccgttctggcgccggtgccaggtggaatgttggatagaagaagactgctgttgattcctgcaatcagcatcagcattggctccttcgacaagggggcagcaaaagctgagtttgctgatatgcctgcgcttcgtgggaaggattatggaaagacgaagatgaagtacccagattacactgaaacagaatcaggtcttcagtacaaggacttgagagttggtgatgggccttctccaaagaaaggggaaacagtagtggttgattgggatggctacacaattggatactatggtcgcatttttgaagctcgaaacaagaccaaaggtggttcctttgagggtggtgataaagacttctttaaatttaagattggatcaggacaggtcataccagcttttgaggaggctatatcagacatggctccaggtggagttaggaggataatagtaccaccagatcttggatacccagacaatgactacaacaagttgggtccaaaaccaacgacattctcgggacaaagggctctggattttgttctgaggaatcaagggttgatagataaaactctcctgtttgacattgagcttttgaagattataccaagtcaatag

SEQ ID NO: 94 - protein, 237 aa, Oryza sativa
MDLVRALAAIPARHPLPPSSLTKARRHGPQPSTTVLAPVPGGMLDRRRLLLIPAISISIGSFDKGAAKAEFADMPALRGKDYGKTKMKYPDYTETESGLQYKDLRVGDGPSPKKGETVVVDWDGYTIGYYGRIFEARNKTKGGSFEGGDKDFFKFKIGSGQVIPAFEEAISDMAPGGVRRIIVPPDLGYPDNDYNKLGPKPTTFSGQRALDFVLRNQGLIDKTLLFDIELLKIIPSQ

SEQ ID NO: 95 - DNA, 1659 bp, Oryza sativa
atggagctctccctctccgcgcgcctcgccctcccgctctcgccggcggcggggacggcgcggccgcggcggccggccgccttcgcctgccgctgctgctccggcggcgcctcccacgacgggaccacccggcggcgatggctcgcctccctcctcgccgccaccgctgcagctgtggggattggcgtggctgggggagacgccgatgcggtgtctaccagccggagagcgctcaggagcgccaagattccggagagcgagttcaccaccctgcccaatggccttaagttctgttatcgtgtgactggaaggcagaccattctttgctattttccattttctgaatgccgtgtaacttccgaagctttgagcaggtattacgacatcacggtgggatctgggctcaaggctgttaagggatcccgtgtcgcagtacattatgtggccaagtggaagggcataacattcatgacaagcaggcagggtctcggtgttggtggcggaacgccatatgggtttgatattggcaattctgaaagaggcaatgttctaaagggattggatcttggggttgagggaatgaaggttggaggccagaggttgatcatagttcctcctgagctggcttatgggaagaagggcgttcaggaaattcctccaaatgcaactattgaggcctccgatagttcatcagaagtttcagtcaatagagttcaagatgatcagagaatgatgatggaagacgtcaacagcttgaagcgcatggtgtccgccctcgaagagcaggctgcgagcatcgaatcgcagttccatgactactgcgacatgaaggagcaggaatcaacataccagaagatgcagatcatgtgcctggggatgaagctggagcagctggagtctcagaaccagaggctggaagcagctgctgcggagatccgcgcatctgctgaagagttcgcgacgatgcgagctaggttcgatgcgatgcagagcaagtccaagaagatctggaagaagaacaagcaagacctggacgccattgatgaaagagtcctggctcttgatgccagggaggcagaaatggcaacaaggtgccagggctttgagcagttcatggaggagatgaagcagctcactttgcagctgcagaaggagaaaggaacaaacaatgagaatgtggaggtgattgtggagagaagcatgagaaagctggggtcgagcggcagggacgttcttgacgggctggaggcgctccgggaccggtgggcggccgacatggaggagatgatctacctcggctggatcacggcgtggctgcagcacgacctcctcgtcctcgacggcggcgaggtcggcacgccggcggcgatcatcggcgacgagacaccggcgcagccgcggcacaagggggagaaggtggtggtcgcggtggcgccgagcaacgaggtggagctctgcaaggcggcgtcggcgtcatcgagctcgtcgtcggagatgcgcggcgcggcggagccgtcgtgcatgatggggttcgtcgccggcgggtgcacgagcatcggacggcccagattgctccgcaggctgagggggtgggccggtgggaagggcgggagcagcaggaggcagtgcaagatcgaattcccaactagtccgatgtaa

SEQ ID NO: 96 - protein, 552 aa, Oryza sativa
MELSLSARLALPLSPAAGTARPRRPAAFACRCCSGGASHDGTTRRRWLASLLAATAAAVGIGVAGGDADAVSTSRRALRSAKIPESEFTTLPNGLKFCYRVTGRQTILCYFPFSECRVTSEALSRYYDITVGSGLKAVKGSRVAVHYVAKWKGITFMTSRQGLGVGGGTPYGFDIGNSERGNVLKGLDLGVEGMKVGGQRLIIVPPELAYGKKGVQEIPPNATIEASDSSSEVSVNRVQDDQRMMMEDVNSLKRMVSALEEQAASIESQFHDYCDMKEQESTYQKMQIMCLGMKLEQLESQNQRLEAAAAEIRASAEEFATMRARFDAMQSKSKKIWKKNKQDLDAIDERVLALDAREAEMATRCQGFEQFMEEMKQLTLQLQKEKGTNNENVEVIVERSMRKLGSSGRDVLDGLEALRDRWAADMEEMIYLGWITAWLQHDLLVLDGGEVGTPAAIIGDETPAQPRHKGEKVVVAVAPSNEVELCKAASASSSSSSEMRGAAEPSCMMGFVAGGCTSIGRPRLLRRLRGWAGGKGGSSRRQCKIEFPTSPM

SEQ ID NO: 97 - DNA, 591 bp, Oryza sativa
atggagctggtctcctcgtcgcgctccgtccttcctcggtgcggcggcggcggcgttgcaggtgtagctgctgctccgttcaggacggcgtccgccagctcgaggcgcaaggggacgagcggattcgtgtgtgctttgggttgcgatggtgaggggaagaagagcgtggcggaggggacggtcagaaggagggcggccctcgctttgctgctggcttcgccggcgatgtcggtggcgttctcggctcacgggaagaccaaaagcaggaacccttacgacgagaggcggctgcttcagcagaacaagaagatccaggaagccaaccgggctcctgacgattttccgaatttcatcagggaaggtttcgaagtcaaagtagtgacatctgacaactacataacgcgagactctgggctactgtatgaggacatcaaagttggtacgggcaactctccaaaggatggtcagcaggttatatttcactatgtgggctacaatgagtcagggcgcaggatagatagcacctacattcagggttcacctgccaaaattcggttagggaacaaaacactggttccaggaaagttttga

SEQ ID NO: 98 - protein, 196 aa, Oryza sativa
MELVSSSRSVLPRCGGGGVAGVAAAPFRTASASSRRKGTSGFVCALGCDGEGKKSVAEGTVRRRAALALLLASPAMSVAFSAHGKTKSRNPYDERRLLQQNKKIQEANRAPDDFPNFIREGFEVKVVTSDNYITRDSGLLYEDIKVGTGNSPKDGQQVIFHYVGYNESGRRIDSTYIQGSPAKIRLGNKTLVPGKF

SEQ ID NO: 99 - DNA, 1743 bp, Oryza sativa
atggacgacgacttcgagatgccgccgcccggcgccgacgacgacttgatgatgggggaggacgggatgggcgacttcggcggcgccgacgggccgccgctgaaggtcggagaggagaaggagatcgggaagcagggtctcaggaagaagctgctcaaggagggcgaggggtgggagacccccgaggtcggcgacgaggtcgaagtacactacactggcacactgcttgatggaaagaagtttgattcaagccgtgaccgtgggacacccttcaagtttaagttgggacaaggtcaagtgataaaaggttgggatctaggtatcaagaccatgaagaaaggcgaaaatgctgttttcaccattcctcctgatttggcctatggtgaatctggttcacctccaactattccagccagtgccacactgcagtttgatgttgagttgctttcttggacaagtgtcaaggacatttgccaagatggtggtatattcaagaagatactgaaggagggagaaaaatgggagaacccaaaagatcttgatgaagtatttgtgaaatatgaggctcggcttgaggatggcactgttatatcaaagtctgagggcgctgaatttactgttaaagatggtttcttctgccctgcgctggcgaaagctgtcaaaaccatgaaaaaagcagagaaagtgctccttacagttaagccacaatatggatttggtgagaatggtagaccagcagctggtgaggaaggtgctgtgccaccaaatgccactcttcttgttaatcttgagttggtttcatggaaaacagtcacagaaataggtgatgataagaaaatcttgaagaaagttctgacggagggtacagggtatgagcggcccaatgaaggtgcagttgttaaagtcaaaataactggaaaacttcaggatggtacaatatttacaaagaaggggcatgatgaaccagagccatttgaattcaagactgatgaagaggaggtcattgatggtattgaccgtgctgtgctaaacatgaagaatggcgaggttgctcttgtaacaattcctcctgaatacgcatttggttctactgagtcaaagcaggatctcgctgtagttccaccaaacagcactgtgatttatgaggttgagcttgtatcattcgtgaaggataaagaatcttgggacttgaacaataccgagaagattgagactgctggggcaaagaaagaagaggggaatgcattgttcaagctgggcaaatatgtcagggcttcaaagcgttatgagaaggctgcaaaattcattgagtatgacagctcatttagcgaagatgagaagaaacaatccaagcaactgaaggttacctgcaacttgaacaatgctgcctgcaagctgaagctgaaagattacaagcaagctgagaagctttgcaccaaggttctggaacttgacagccaaaatgtcaaggctttatacaggagggcccaagcttacatgcaacttgctgacctagagttagcagaggtggatattaagaaggcacttgaaattgatcctgataacagggatgtgaagttgacatacaagaacctcaaggaaaaggtcaaggagtacaacaagaaggatgccaaattctacagcaatatgttcgccaagatgaccaagcagccagccgaagacggcaaagctggatctggagctgaatcgaagcaaggatcggaacctgttactgctgcctaa

SEQ ID NO: 100 - protein, 580 aa, Oryza sativa
MDDDFEMPPPGADDDLMMGEDGMGDFGGADGPPLKVGEEKEIGKQGLRKKLLKEGEGWETPEVGDEVEVHYTGTLLDGKKFDSSRDRGTPFKFKLGQGQVIKGWDLGIKTMKKGENAVFTIPPDLAYGESGSPPTIPASATLQFDVELLSWTSVKDICQDGGIFKKILKEGEKWENPKDLDEVFVKYEARLEDGTVISKSEGAEFTVKDGFFCPALAKAVKTMKKAEKVLLTVKPQYGFGENGRPAAGEEGAVPPNATLLVNLELVSWKTVTEIGDDKKILKKVLTEGTGYERPNEGAVVKVKITGKLQDGTIFTKKGHDEPEPFEFKTDEEEVIDGIDRAVLNMKNGEVALVTIPPEYAFGSTESKQDLAVVPPNSTVIYEVELVSFVKDKESWDLNNTEKIETAGAKKEEGNALFKLGKYVRASKRYEKAAKFIEYDSSFSEDEKKQSKQLKVTCNLNNAACKLKLKDYKQAEKLCTKVLELDSQNVKALYRRAQAYMQLADLELAEVDIKKALEIDPDNRDVKLTYKNLKEKVKEYNKKDAKFYSNMFAKMTKQPAEDGKAGSGAESKQGSEPVTAA

SEQ ID NO: 101 - DNA, 822 bp, Oryza sativa
atggctgcaaccgcttcgtcctcctccaccgccaccgcctcgccgctcctcctcccctcggcccgccgcccgctcccttcctccaaaccgtggcttcccgacggcagggcgttcaggggcagcagggcgctgagttcagcggcgcggcgatgcttctgctgctgctgcaggtgcgaggccgccggtgaggcgggaacggcgccgccgccgcagcagcgcggagtggatgacggcggcgtggtctgtaccagcgccacccggtcccggaggaggagcgttcttggagtcgccgtgggggtatcgtcggcgctggcgctcggcctggccgcgttcgatgatgccctcgccgccgggctgcctcccgaggagaagcccaagctctgcgacgccgcctgcgagaaggacctcgaaaatgtgcccatggtgactacagagtctggtcttcagtacaaggatatcaaagtgggtgaaggcccaagtccacccattggcttccaggttgctgcaaattatgttgccatggtaccgaatggacagatatttgacagttctctggaaaaggggcagccctacatattccgtgttggttcaggacaggtgataaagggacttgatgaagggatattgtcaatgaaggttggaggactacggcgattatacatacctggcccggtaagtagcctaaactccccaatgtcaacaaatattatgcaagagaaaatgaaagatgtggtaaatttggggccagacaattgcagccattgctatggcatcatttttcccctcttagcacagagatttgaaaggagggtgataatttga

SEQ ID NO: 102 - protein, 273 aa, Oryza sativa
MAATASSSSTATASPLLLPSARRPLPSSKPWLPDGRAFRGSRALSSAARRCFCCCCRCEAAGEAGTAPPPQQRGVDDGGVVCTSATRSRRRSVLGVAVGVSSALALGLAAFDDALAAGLPPEEKPKLCDAACEKDLENVPMVTTESGLQYKDIKVGEGPSPPIGFQVAANYVAMVPNGQIFDSSLEKGQPYIFRVGSGQVIKGLDEGILSMKVGGLRRLYIPGPVSSLNSPMSTNIMQEKMKDVVNLGPDNCSHCYGIIFPLLAQRFERRVII

SEQ ID NO: 103 - DNA, 1638 bp, Oryza sativa
atggcgaccttctggggattggagttgaagcccggtgaggcctacacccatcactccgcgcccgcccgcctccggattacccaggctgtgctgggcagttgtgatcaaggttggactacactacaatgtgataccaatgacagggagactgtgcgcctctgtgttttaaatcctgggcttgctgtggcatgtcacctagagctggaattacagaaggatgagaatgttctcttatcagttgacggacagaactcgatacacctgtccggatactacacctgttcccatagtggcaatcatgggcgcaatagtcagaagcccactagtaaagctgtaggaagtactggcttcaataaaaagcatcaagatatttctgacaaggcaccagtgatagaggagatactagatgaccagacagtacagcagcaacagcagcaaggtgttaacatcagctcgaaggatgtagaaccttctcataaaaatggtcatggacaaaatagtgaatgggccacttgtggtaatggtactgatgatgacaatgataataatggtgctatgttttatccttcatctcgcaacaaaatggaagtagacgagcccacaggaagtaaagacaatgattatgattattggcttcctttccttgatgcttctgtaaagagaaaggcttctgaaactgatggagaaaatgtgtacacagagaagggggagttgaagacgccaaagatagagaatgtgctaagtgatcaaagtgtggatatggatcaagttaatgaacaaacgtgctcaaaaaatgtggaacctaatgaaattgatgatgtaaagccaactcgaggtcacaagaataccatggaagtagtacttcctctccttgattcttctgtaaagagaaaggctgctgagattgatggagaaaaggtgcaaatagagaaggccaaattgaagatgccaaagacagaggatgtaccaagtgatcaaaataatgctaatcaagtgaatgaacaaatatgctttaaaactgtggggtccaatgcaattgatgacgcaaagttaagtctaggtcaccagaataccctggaagatcttgacaagagtcaggagctaaatgtttcacaaacaaaagggcagaatgatgttgcagatcaaattacaaatcaagacacgcctacaatcacgagctctgatgaacgctacatttttactggtgctcttgaaactgatattgaacaaaaaaatcgaggggctgaaaatgaacaagttgaggtccatcgttgcccctttgaggtgcttgataatggtatcaaagtggagcatctggttgaggggaatgctaaagccaaagttgcatctaagggcaaacaggtttgtgtgaggtattgtggtcggttgatcaatggtgaagttatcgaccctactaaccttgacgacgacacccatacattcaggcttggtgcgggtgaagtcattcctggatgggatattggcattcttggcatgcgtgttggtggcaaaaggagactcacaatccctcctgctcaaggctatggtgatgttgcgacaccaaagataccagcaaactcttggctcgtgtatgaagtcgagttgctggaagtgaagcgagccaaaagggcacgttga

SEQ ID NO: 104 - protein, 545 aa, Oryza sativa
MATFWGLELKPGEAYTHHSAPARLRITQAVLGSCDQGWTTLQCDTNDRETVRLCVLNPGLAVACHLELELQKDENVLLSVDGQNSIHLSGYYTCSHSGNHGRNSQKPTSKAVGSTGFNKKHQDISDKAPVIEEILDDQTVQQQQQQGVNISSKDVEPSHKNGHGQNSEWATCGNGTDDDNDNNGAMFYPSSRNKMEVDEPTGSKDNDYDYWLPFLDASVKRKASETDGENVYTEKGELKTPKIENVLSDQSVDMDQVNEQTCSKNVEPNEIDDVKPTRGHKNTMEVVLPLLDSSVKRKAAEIDGEKVQIEKAKLKMPKTEDVPSDQNNANQVNEQICFKTVGSNAIDDAKLSLGHQNTLEDLDKSQELNVSQTKGQNDVADQITNQDTPTITSSDERYIFTGALETDIEQKNRGAENEQVEVHRCPFEVLDNGIKVEHLVEGNAKAKVASKGKQVCVRYCGRLINGEVIDPTNLDDDTHTFRLGAGEVIPGWDIGILGMRVGGKRRLTIPPAQGYGDVATPKIPANSWLVYEVELLEVKRAKRAR

SEQ ID NO: 105 - DNA, 1251 bp, Oryza sativa
atgggcgggggcggagaaggcagcgggcggcgggtgggcgcgaggctagcgacgggcaagggcggaggcggcagcgggcggcgggcgggcggcggtcgaggagccgaggtttctcgagccccggctacgctaggaaattttgaccattctggttgggtccttgttgaatgcaaggttggtgaccaggggctcgtgaaggttgctgccctaaatcctgaaactgctccagttgcccccctagagctggaatttgaggagaacaagaatgtggttttatcagtccgtggtcagaactcagtacacttatcaggatactacatctgttcttacaatggtgactatggtgaaaacagcaaacaagccactaaagaaacctctttgcttaagtatgcaagcggattgccctgcaaacctgtgcttataggccaatttcgcaggccagtgttggcttgtgaaaattgcctaataagcagggtctcgaaagatgatggtgctgctgaaaacaatgatgaaaaacaaggggatgaagctaaacagtctaaaaatgtacaggccgaactgcagcctcacattcgcgtacttgatagtgaccatggtgaaaacagcaagcaagccactaaagaaatggaatccaatgcaatggatgaagatgcatctcttggcctagagcatactctgggaggcaatgtggttcaagctgctagtcaggaggaaaatgcttcacaaactcatgaggataatgatgctgcagatcatattatccaacaaactgaccctcctatcctggtctcagaagatgatggtactgccgaagacaatgatgaggccgaactgcagcctcgcattcgtgtacttgatagtggtatgacaatagaagatctggccaagggaaatgttggtgccaaaattgcatcttgtggcaaaaaggtttatgtgaagtatgtctgtatgttgagcaatggtgatactgttgatcctaccggtgaaagttccacttgcaaattcaaacttggtgctggagaagtcattagtggatgggatcttggtatcgatggcatgcgtgtaggtggaataaggagacttggcattcctccccatctaggctatggtgatgttggaagaggaaacataccaccaaacgcgtggctcaactttgatatcgaactgctgaaagtcaagagtggacgcaagaaggcacggaaagtcgatttcatgtatgttgccttggatagagcctacattcagctatga

SEQ ID NO: 106 - protein, 416 aa, Oryza sativa
MGGGGEGSGRRVGARLATGKGGGGSGRRAGGGRGAEVSRAPATLGNFDHSGWVLVECKVGDQGLVKVAALNPETAPVAPLELEFEENKNVVLSVRGQNSVHLSGYYICSYNGDYGENSKQATKETSLLKYASGLPCKPVLIGQFRRPVLACENCLISRVSKDDGAAENNDEKQGDEAKQSKNVQAELQPHIRVLDSDHGENSKQATKEMESNAMDEDASLGLEHTLGGNVVQAASQEENASQTHEDNDAADHIIQQTDPPILVSEDDGTAEDNDEAELQPRIRVLDSGMTIEDLAKGNVGAKIASCGKKVYVKYVCMLSNGDTVDPTGESSTCKFKLGAGEVISGWDLGIDGMRVGGIRRLGIPPHLGYGDVGRGNIPPNAWLNFDIELLKVKSGRKKARKVDFMYVALDRAYIQL

SEQ ID NO: 107 - DNA, 1275 bp, Oryza sativa
atggcgttctggggtgtggaggtgaaggctgggaagccctacacccaccgccacgatccctcacatggccgcctccgcatttgccaggctacacttggaagttgcgattcggctaccaggacgatagtacaatgtaatgttggtagcaagacgcccatcatactctgtagtctgaatcctaaattggctgagatgtgccatctagaggttgagttggaggaggacgatgaggttgtgttttcagtacttggtcagagctccattcatctctcaggatattacattcgttcaagcggcagatctaatgcaggagatgacgaatcagaatcttatggggaggatgttggagagtctgatactgatcaggagtttaacgcgagtgacgacagctatgaatctgactttattgatgatggtgatgttgaagtatctgaggataagtccagatctgactctgttgatgatggtgatgcatgctccacccctgatcatcacaaaaaaaaggataaagttcaaaagaggcgtcgcttgaagaagaaacacccagctgatagcagtgatgataacaatgatgattcttcccacaggcctgttgtcaggtgtaaggcttattcaatgtttgatagttgcagtgaagatgaagataacatgtctgttcctgtttctttggctaagaaagaaaacactaaagatgttgacgaaacaaaatacccaaatagtgagttaaatgatgacaccacgaaaaagagtaatggtgccaagaaaagaaaaggtgatgccatcagtcaggatcatgcacctttgatggatctaacaaatgcagatgaaccattggtttcaaaagaaggcagaacaaaaaagaaatcgaagaaaaagggaggaaaacagttagaggtaggagatggaaaacattccaacaagataagaacattagaagatggattgatagtagaagatctgtcaacaggaaacctagatgcagaaatggcttctaatggcagcaaggtttctatcaaatatgttggcacactacaggatgggaagattgttgagtctaatgttggtgaaaagccctacaaattcaagcttggtgctgggaaagtaattcgaggatgggatgtcggtatttgtggcatgcgtgttggggacaaaagaaagctcaccgtcccaccagctatgtgttatggcagtaaagcaataggagaagtacccaaaaattcatcaatcatctacgaaatcgagttagtgaaggtcagatccaaaagcacatcatga

SEQ ID NO: 108 - protein, 424 aa, Oryza sativa
MAFWGVEVKAGKPYTHRHDPSHGRLRICQATLGSCDSATRTIVQCNVGSKTPIILCSLNPKLAEMCHLEVELEEDDEVVFSVLGQSSIHLSGYYIRSSGRSNAGDDESESYGEDVGESDTDQEFNASDDSYESDFIDDGDVEVSEDKSRSDSVDDGDACSTPDHHKKKDKVQKRRRLKKKHPADSSDDNNDDSSHRPVVRCKAYSMFDSCSEDEDNMSVPVSLAKKENTKDVDETKYPNSELNDDTTKKSNGAKKRKGDAISQDHAPLMDLTNADEPLVSKEGRTKKKSKKKGGKQLEVGDGKHSNKIRTLEDGLIVEDLSTGNLDAEMASNGSKVSIKYVGTLQDGKIVESNVGEKPYKFKLGAGKVIRGWDVGICGMRVGDKRKLTVPPAMCYGSKAIGEVPKNSSIIYEIELVKVRSKSTS

SEQ ID NO: 109 - DNA, 465 bp, Oryza sativa
atggcgaagccgcagcttcttctggtcgtcgccgccgccgcactgctactcgtcgttgcagcctccgccaagaaatccggcgacgtgacggagctccagatcggcgtcaagcacaagccagaatcctgcagcattcaagctcacaaaggcgacagagttaaagttcactaccgtggaaaacttactgatggaacagattttgattctagctatgaaagaggtgacccaatcgaatttgagttgggcactggccaagtgatcaaagggtgggatcagggcattctgggcatgtgcgttggcgagaagaggaagctgaagatcccttcaaagctcggttatggtgctcaagggtcaccgccgaccatccctggtggagcgactctcattttcgataccgagcttgttgctgtcaatggcgagccagccagcaaatccgatgaggacgatgatgacagcgagctttag

SEQ ID NO: 110 - protein, 154 aa, Oryza sativa
MAKPQLLLVVAAAALLLVVAASAKKSGDVTELQIGVKHKPESCSIQAHKGDRVKVHYRGKLTDGTDFDSSYERGDPIEFELGTGQVIKGWDQGILGMCVGEKRKLKIPSKLGYGAQGSPPTIPGGATLIFDTELVAVNGEPASKSDEDDDDSEL

SEQ ID NO: 111 - DNA, 1128 bp, Oryza sativa
atggctgtggtggaggaagaagagggctcgccgccggcacccgccgccgccgccgatcccgcctcctctggttcaagtgataatgagataactgtagaggaagcttcttttgtgcatactgaacctccgcaagatggctctgtcccacctgtggtttcctctaatatggaggtccttcatgacaaagttaaaaaacaagtcatcaaagaaggccatggcaagaaaccatcaaagttcgcgacgtgctttttgcactatagagcttgggttcaaggctctctgcataaattcgaggatacttggcaagaacagcatcccattgaactagtaattggaaaagagaaaaaacaaatgtctggtttaggcattggtgttggtaacatgagaagtggggagcgtgcactgttgcatgttggctgggagctaggctatgggaaagaagggagcttttcattcccaaatgtccctccaatggcagatcttttatatgaagttgaacttattgggtttgatgatgtcaaagaggggaaagcccgaagtgacatgacagtagaggaaaggattgaagcagcggacaggaggaagattgagggcaatgagtatttcaaagaaaagaagtttgaggaggccatgcagcaatatgaaatggcgattgcatacatgggagatgacttcatgtttcaattgttcgggaaatacagagatatggccttggctgtgaaaaatccatgtcatctcaacatggccgcatgcctaatcaaactgaagagattcgatgaagctatcgcacagtgtagtattgtgttggcagaggatgaaaacaatgtgaaagcattgttcagacgaggaaaagcaagagctgaacttggtcagacagaatcagcgagggaggacttcctgaaagccaagaaacattccccagaagacaaggagatccagcgtgagcttcggtctctcgcggaacaggataaagctctgtaccaaaaacagaaggagctgtacaaaggcctctttggtccaaggcccgaacccaaaccgaaggcgtcaaattccatcgttcgcttctggcagtggctcgtgtccttgattggttatctcataaaactgttcaaacccaagaatgaatga

SEQ ID NO: 112 - protein, 375 aa, Oryza sativa
MAVVEEEEGSPPAPAAAADPASSGSSDNEITVEEASFVHTEPPQDGSVPPVVSSNMEVLHDKVKKQVIKEGHGKKPSKFATCFLHYRAWVQGSLHKFEDTWQEQHPIELVIGKEKKQMSGLGIGVGNMRSGERALLHVGWELGYGKEGSFSFPNVPPMADLLYEVELIGFDDVKEGKARSDMTVEERIEAADRRKIEGNEYFKEKKFEEAMQQYEMAIAYMGDDFMFQLFGKYRDMALAVKNPCHLNMAACLIKLKRFDEAIAQCSIVLAEDENNVKALFRRGKARAELGQTESAREDFLKAKKHSPEDKEIQRELRSLAEQDKALYQKQKELYKGLFGPRPEPKPKASNSIVRFWQWLVSLIGYLIKLFKPKNE

SEQ ID NO: 113 - DNA, 1113 bp, Oryza sativa
atggccgtgctggaagaagatccggccccggtacccgccgccgattctacctccggtgctagcgatgatgagataacagtggaagaaacttcctttgtgcatactgagcctcctcaagatggcactgctccacctgtggttacctctgatatggaagtccttaatgataaagtcaaaaagcaagtcatcaaggaaggccatggcaagaaaccctcaaggtttgccacatgctttgttcactatagagcatgggttcaaggttcttcgcacaaattcgaggatacttggcaagaacagcattcaattgaactagtacttggaaaagagaaaaaggaaatgactggtttaggcattggtgtcagtaacatgagaagtggggagcgtgcattgttacatgttaactgggagcttggctatgggaaagaaggaagcttttcattcccaaatgtccctccaatggcagaccttgtatatgaagttgaacttattgggtttgatgatgtcaaagagggaaaagcccgaagtgatatgacagtggaagaaaggattgaagcagcagacaggaggaagattgaaggcaatgaatatttcaaagaaaagaagttcgaggaggctatgcagcaatatgaaatggcaattgcatacatgggggatgatttcatgtttcaattgtttgggaagtacagagacatggccttagctgtgaaaaatccctgccatctcaacatggccgcatgcctgatcaaactgaagagatttgatgaagctatcgcacagtgtacaattgtgttgtcagaggatgaaaacaacgtgaaagcgttgttcagacgaggaaaagctagagctgaacttggtcaaacagaatcagcaagggaggacttcctgaaggccaagaagtattctccagaagacaaggagatccagcgcgagcttcggtcgctcgcggagcaggataaagctctgtaccagaaacaaaaggagctatacaaaggtctgttcgggccaaggcctgaacccaaaccgaaggcgtcaaatttcctagttctcttctggcgatggctggtctccttaattggctatcttgttaaactgttcaaacgcaaggatgagtag

SEQ ID NO: 114 - protein, 370 aa, Oryza sativa
MAVLEEDPAPVPAADSTSGASDDEITVEETSFVHTEPPQDGTAPPVVTSDMEVLNDKVKKQVIKEGHGKKPSRFATCFVHYRAWVQGSSHKFEDTWQEQHSIELVLGKEKKEMTGLGIGVSNMRSGERALLHVNWELGYGKEGSFSFPNVPPMADLVYEVELIGFDDVKEGKARSDMTVEERIEAADRRKIEGNEYFKEKKFEEAMQQYEMAIAYMGDDFMFQLFGKYRDMALAVKNPCHLNMAACLIKLKRFDEAIAQCTIVLSEDENNVKALFRRGKARAELGQTESAREDFLKAKKYSPEDKEIQRELRSLAEQDKALYQKQKELYKGLFGPRPEPKPKASNFLVLFWRWLVSLIGYLVKLFKRKDE

SEQ ID NO: 115 - DNA, 339 bp, Populus trichocarpa
atgggagtggagaaacaagttgtcagacccggaactggtcccaaaccaactgctggtcaaaacgtgaccgttcattgcactggttttgggaaaaatcgtgatctctcacagaagttttggagcaccaaggatccagggcaaaagcctttcgcgttcaaaattggccaaggatctgtcataaagggatgggatgaaggtgtcatgggaatgcaagtgggagaagttgctcgcctgcggtgttctcctgactatgcttatggagctggtggatttccagcttggggaatacaaccaaactcggtcctggattttgagattgaagtcataagtttggagtga

SEQ ID NO: 116 - protein, 112 aa, Populus trichocarpa
MGVEKQVVRPGTGPKPTAGQNVTVHCTGFGKNRDLSQKFWSTKDPGQKPFAFKIGQGSVIKGWDEGVMGMQVGEVARLRCSPDYAYGAGGFPAWGIQPNSVLDFEIEVISLE

SEQ ID NO: 117 - DNA, 462 bp, Populus trichocarpa
atgggcttcaactgcgcatccaaggcgaccgcgatattccttttgctatcagtatcagcgctggtttccgctaagaagtccggcgatgtcaaggaattgcagatcggcgtgaagtacaagcccgaaacttgtgaagttcaggctcacaagggagatagcatcaaagtacactatcgaggaaaactcaccgatggaacagttttcgactccagctttgaaaggggtgatcctattggatttgagcttggcagtggtcaagttatcaaaggatgggaccaaggactgctgggagcgtgtgtaggtgagaagcgaaaattgaaaatacctgcaaaacttggttatggggagcagggatcccctcctactattccaggtggagcgacactaatatttgacactgagcttgtcgaagtgaatgggaaaacatcaagtggagggggagctcgcgatagtgagctttag

SEQ ID NO: 118 - protein, 153 aa, Populus trichocarpa
MGFNCASKATAIFLLLSVSALVSAKKSGDVKELQIGVKYKPETCEVQAHKGDSIKVHYRGKLTDGTVFDSSFERGDPIGFELGSGQVIKGWDQGLLGACVGEKRKLKIPAKLGYGEQGSPPTIPGGATLIFDTELVEVNGKTSSGGGARDSEL

SEQ ID NO: 119 - DNA, 558 bp, Populus trichocarpa
atgtggtctctgcctgtggcttcagtttctaagacaaagaagtgcattcttgacgtgggtttggggcttttagctgcttctgttcttgctttctcaccattggatgctgaagccactagaattgagtactatgctacggtagcagacccaccatgtgaccttaactttgttccctctggccttggttactgtgatatttctgtagggcctggtgtggatgccccgtataatgagctcattaatgtccattacactgcaagattcgctgatgggagagtctttgacagcagctataaacgcggcagacctctcactatgcgcattggcgttggtaaggtcattagaggattggatcagggaattctagggggtgaaggggtgcccccaatgcaagaaggtggaagacgtaagctatatattcctcctcctttagcatatggtccagaacctgcagggtgcttctcaggtgattgcaatatccctggcaatgcaactcttctctatgatattaattttgttggagtttactctgggaataggagtttaccaaaaaaatga

SEQ ID NO: 120 - protein, 185 aa, Populus trichocarpa
MWSLPVASVSKTKKCILDVGLGLLAASVLAFSPLDAEATRIEYYATVADPPCDLNFVPSGLGYCDISVGPGVDAPYNELINVHYTARFADGRVFDSSYKRGRPLTMRIGVGKVIRGLDQGILGGEGVPPMQEGGRRKLYIPPPLAYGPEPAGCFSGDCNIPGNATLLYDINFVGVYSGNRSLPKK

SEQ ID NO: 121 - DNA, 384 bp, Populus trichocarpa
atgtgggttttgggtcttttatctgcttctgttcttggtttctcaccaatggatgctgaagcaaccagaattgagtattatgctactgtagcagacccaccatgtgaacttaactctgttccctctgcccttggttattgtgatgtccgtgacactgcaagatttgctgatgggatagtctttgacagaagctataaacgcggcagacctctcaccatgcgcattggtgttggaaaggtcattgggagattagatcagggaattctaggtgttgaagtggtgctctctatgcaagaaggtggaaaacataagcttcatattcctcccctgttagcatatggaccagaacatgcaggatgcttctcaggtgatgttgccatatga

SEQ ID NO: 122 - protein, 127 aa, Populus trichocarpa
MWVLGLLSASVLGFSPMDAEATRIEYYATVADPPCELNSVPSALGYCDVRDTARFADGIVFDRSYKRGRPLTMRIGVGKVIGRLDQGILGVEVVLSMQEGGKHKLHIPPLLAYGPEHAGCFSGDVAI

SEQ ID NO: 123 - DNA, 546 bp, Populus trichocarpa
agggctctctcattgtctatcatttccttatccacagcactgttttctatacctaccttctcatgtcctgctgcttcttctgctacttcaattactgacttcttggacctcccaaattctggtggtgtcaaggccttggaccttcgcattggttccggtccagtccccgatgagggagaccaggttgcaatacattactatggaaggttggcagcaaaacaagggtggaggtttgattcaacgtatgatcacaaagacagtgctggtgaacctgttccttttgttttcacacttggttctgggaaggtcattgctggcattgaaacggccgtgagatcaatgaaagttggtggggttcgtagagtcatcattccaccttcacagggttaccagaataccactcaagaacctttacctcccaatttcttcgacaggcagaggctgtttactaccattttcaatccaacacgtcttgccaatggagaaggctcaacattgggaactcttatattcgacattgagcttgtcagcctgaggaatcagtga

SEQ ID NO: 124 - protein, 181 aa, Populus trichocarpa
RALSLSIISLSTALFSIPTFSCPAASSATSITDFLDLPNSGGVKALDLRIGSGPVPDEGDQVAIHYYGRLAAKQGWRFDSTYDHKDSAGEPVPFVFTLGSGKVIAGIETAVRSMKVGGVRRVIIPPSQGYQNTTQEPLPPNFFDRQRLFTTIFNPTRLANGEGSTLGTLIFDIELVSLRNQ

SEQ ID NO: 125 - DNA, 495 bp, Populus trichocarpa
atgagaaccgtaacattattcacagcttcaaggttgccaagaagtaaagttaaggtaacggtaccgtcaacctacaaatctattgaggtaaaggtatcgtcagcctccaaatcgattgagccagcaaggatatacttcttgcagttgagcgccaacagtggtggcgttcaagtggaggacggtcagaaggtaaaaattcagtacgagctctatgattattgcactggtgaagtgcgttacgaaacttacttaaaaaaaggtcctgaaataataggtccaggcaagaacgatatatgtgaaggcttgtatgaaggaattgtgggcatgcgagttggggaaacaagaagaatcgtccttccaccgtcttcggatttgaccggtggccaccgaaagagtttttggaatgatctccagaaaattatgcggcggaaaccgtccagttactccgaagaacatagaatctatgatgtgaagttggtcaaaatcattggatga

SEQ ID NO: 126 - protein, 164 aa, Populus trichocarpa
MRTVTLFTASRLPRSKVKVTVPSTYKSIEVKVSSASKSIEPARIYFLQLSANSGGVQVEDGQKVKIQYELYDYCTGEVRYETYLKKGPEIIGPGKNDICEGLYEGIVGMRVGETRRIVLPPSSDLTGGHRKSFWNDLQKIMRRKPSSYSEEHRIYDVKLVKIIG

SEQ ID NO: 127 - DNA, 561 bp, Populus trichocarpa
atgatgggcttgctttcaacttttccttcttatggaaagacaaagagcaagaacccgtatgacgaaagacgcttgctggaacaaaacaagcggatccagaaagagaacaatgtacctgaagacttcccaagttttatcagagaaggttttgaggttaaggtagtagcaccagagaattatataaaacgtgactcagggcttatataccgggattttgaagttggtgaaggtgattgcccaaaggatggccaacaggtgactttccactatgttggctataatgagtcaggtcgtcgcattgacagcacctacttacagggttctcctgcgaaaatccgcatgggcactaatgcattgattccaggatttgaggaaggaattcgagacatgagacctggggggaagaggaggataatcgttcctccagaacttgggccaccggttggaccttccacttttttcagctcaaaacagttcgaagtttttgatgtggaacttctcaacgttaaggactgtcaaaggaggactataggattttactctgatgttgtgtgcaactga

SEQ ID NO: 128 - protein, 186 aa, Populus trichocarpa
MMGLLSTFPSYGKTKSKNPYDERRLLEQNKRIQKENNVPEDFPSFIREGFEVKVVAPENYIKRDSGLIYRDFEVGEGDCPKDGQQVTFHYVGYNESGRRIDSTYLQGSPAKIRMGTNALIPGFEEGIRDMRPGGKRRIIVPPELGPPVGPSTFFSSKQFEVFDVELLNVKDCQRRTIGFYSDVVCN

SEQ ID NO: 129 - DNA, 567 bp, Populus trichocarpa
atgagtgattcaattgatttatccggtgatggaggtgttgtcaagacaatcttgaggaaagcgaaagctgatgcgctttgtccttcggatgatcttcctcttgttgatgttcaatacgagggcacacttgctgaaaccggtgaagtttttgatacgacacgcatggataatactgtgttctcatttgaacttgggaagggctcggtgattcaggcatgggagattgcagtgaaaaccatgaaggttggggaggttgcaaaaattacttgcaaaccagaatttgcttatggcagtgcaggttccccgccagatatcccacctgacgcaactcttatttttgaggtggagttggtggcctgcaagccacggaagggttccagtgtgaccagtgtttcagaagagagggccaggctcgaggagctgaagaagcagagggagcttgctgcagcagctaaagaggaagagaagaagaggagagaagaagctaaagccgccgctgccgccagaatacaagccaagctggaatcgaagaaaggtcaagggaaggggaagggaaaggcaaaatag

SEQ ID NO: 130 - protein, 188 aa, Populus trichocarpa
MSDSIDLSGDGGVVKTILRKAKADALCPSDDLPLVDVQYEGTLAETGEVFDTTRMDNTVFSFELGKGSVIQAWEIAVKTMKVGEVAKITCKPEFAYGSAGSPPDIPPDATLIFEVELVACKPRKGSSVTSVSEERARLEELKKQRELAAAAKEEEKKRREEAKAAAAARIQAKLESKKGQGKGKGKAK

SEQ ID NO: 131 - DNA, 558 bp, Populus trichocarpa
atggccaccgatatctacgccatttcccccgatatatcgtctgcgattcaacctgatttcttcgtttcttttcggtttctcggctctatcactgaatcagttcaatatgagggcatgcttgctgaaaccggtgaggtttttgacacgacacgcgaggataacactgtcttctcatttgaacttgggaagggctcggtgattcaggcatgggagattgccgtgaaaaccatgaaggtcggggaggttgcaaaaattacttgcaaaccagaatatgcgtatggcagtgcaggttccccgccagatatcccaactgacgcaactcttatctttgaggtggagttagtggcctgcagaccacggaagggttccagtgtaaccgatgtttcagaagagagggctaggctagaggagctgaagaagcaaagagagcatgctgctgcagctaaagaggaagaaaagaagaggagagaagaggctaaagcagccgctgctgcccgcatgcaagccaagctggaatcaaagaaaggtcaaggaaagggaaaagggaagggaaaataa

SEQ ID NO: 132 - protein, 185 aa, Populus trichocarpa
MATDIYAISPDISSAIQPDFFVSFRFLGSITESVQYEGMLAETGEVFDTTREDNTVFSFELGKGSVIQAWEIAVKTMKVGEVAKITCKPEYAYGSAGSPPDIPTDATLIFEVELVACRPRKGSSVTDVSEERARLEELKKQREHAAAAKEEEKKRREEAKAAAAARMQAKLESKKGQGKGKGKGK

SEQ ID NO: 133 - DNA, 648 bp, Populus trichocarpa
atgaactcattggcattttcggttgggaattacactcccagaaacctcagcgcacccaatacaacattgcccgctaagaatcttgacacaacaaaagtatcgagtatcaaattctcgagccacagccaagaaaacttttctcgacagctgcagccgaaagaaagccagacttttttcaagagaagagaagcaattggtcttggcttctgcgcaggctttcttgatgttctcttgcaacaacagctcactgcaacagctgaagaagctccatgtgagctaacagttgctccttcgggtcttgccttctgtgacaaaattgtgggcactggccttgaggctgtcaagggacagctcattaaggcacattatgtcgggaaattggagagtggaaagattttcgatagcagctacaatcgtggaaagcctctcacgtttcgagttggggttggtgaggtcatcaaaggctgggaccaaggtattctaggtggtgatggaattcctcctatgctagctggtggaaaacgtaaactgaagctccctccagaactggcatatggcatgagaggggctggatgcaaaggaggttcttgcatcattcctccagattcagtcctgttattcgatgtagagttcattggaaaggcttga

SEQ ID NO: 134 - protein, 215 aa, Populus trichocarpa
MNSLAFSVGNYTPRNLSAPNTTLPAKNLDTTKVSSIKFSSHSQENFSRQLQPKESQTFFKRREAIGLGFCAGFLDVLLQQQLTATAEEAPCELTVAPSGLAFCDKIVGTGLEAVKGQLIKAHYVGKLESGKIFDSSYNRGKPLTFRVGVGEVIKGWDQGILGGDGIPPMLAGGKRKLKLPPELAYGMRGAGCKGGSCIIPPDSVLLFDVEFIGKA

SEQ ID NO: 135 - DNA, 618 bp, Populus trichocarpa
atgatgtatgcacttccattccaaaccttgcttcacttcccttgcgcttccaaatttacaagacccaaggatgcgatgcccatggacttgcattgcaaattttcttcactagaaataaaaagattgtcaaggaggatggtgctgaagttttgtggattcaatactctcctattgtccatcaatccagttttggctgccccgatgccagagatgaaggagcctgaagttattcggacactgaagcttgccagtggggttaggtttcaagagattattgaaggggaagggccggaagctcaagagggagatacagttgaagttaactatgtttgcaggcgttcaaatggatattttgttcatagcaccgtggatcaattcagcggcgaaagctcgcctgtcatacttcctttggatgagaaccagattattaagggcttgaaggaagtcttgattggcatgaaggttggaggtaagagaagagcattgatacctccttctgttggatacgtaaatgaaaacttgaaaccaatccctgatgagtttggccctcgacgtagcctcttctcccatgcaaatgagcctctcatatttgaagtgcagctcttgaaagtcctctaa

SEQ ID NO: 136 - protein, 205 aa, Populus trichocarpa
MMYALPFQTLLHFPCASKFTRPKDAMPMDLHCKFSSLEIKRLSRRMVLKFCGFNTLLLSINPVLAAPMPEMKEPEVIRTLKLASGVRFQEIIEGEGPEAQEGDTVEVNYVCRRSNGYFVHSTVDQFSGESSPVILPLDENQIIKGLKEVLIGMKVGGKRRALIPPSVGYVNENLKPIPDEFGPRRSLFSHANEPLIFEVQLLKVL

SEQ ID NO: 137 - DNA, 645 bp, Populus trichocarpa
atgatgggtgaaatgcagaatggacatgtagtattatgtcatgaagagaaattgaggcgtaggttcctcctcttcttttctttctcatcaggcttgctttcaacttttccttcttatggaaagacaaagagcaagaacccgtatgacgaaagacgcttgctggaacaaaacaagcggatccagaaagagaacaatgtacctgaagacttcccaagttttatcagagaaggttttgaggttaaggtagtagcaccagagaattatataaaacgtgactcagggcttatataccgggattttgaagttggtgaaggtgattgcccaaaggatggccaacaggtgactttccactatgttggctataatgagtcaggtcgtcgcattgacagcacctacttacagggttctcctgcgaaaatccgcatgggcactaatgcattgattccaggatttgaggaaggaattcgagacatgagacctggggggaagaggaggataatcgttcctccagaacttgggccaccggttggaccttccacttttttcagctcaaaacagttcgaagtttttgatgtggaacttctcaacgttaaggactgtcaaaggaggactataggattttactctgatgttgtgtgcaactga

SEQ ID NO: 138 - protein, 214 aa, Populus trichocarpa
MMGEMQNGHVVLCHEEKLRRRFLLFFSFSSGLLSTFPSYGKTKSKNPYDERRLLEQNKRIQKENNVPEDFPSFIREGFEVKVVAPENYIKRDSGLIYRDFEVGEGDCPKDGQQVTFHYVGYNESGRRIDSTYLQGSPAKIRMGTNALIPGFEEGIRDMRPGGKRRIIVPPELGPPVGPSTFFSSKQFEVFDVELLNVKDCQRRTIGFYSDVVCN

SEQ ID NO: 139 - DNA, 714 bp, Populus trichocarpa
atggaactgatctccctcttccctagctatcatcaaaaccccactgccattctactccgcgagcctctcctctccattcccatcacaaagaggaggctgtccaacggaaattcaggtgcgttgaaatgtcgctcctcaccgtcttcctctgatgatgagactacaaaaccaaccccactatctttgcaccaggagggaaggagggcactcgttgcttctctcctttcaactgctgttgggatttatgtctgtgatgtggccgaggctgctagcacgagtagaagagctcttagagcatcaaaaataccggagagtgacttcacaaccctctccaatggtctgaagtactatgacttgaaggtcgggggtggacctaaggccgtgaagggatctcgggttgcagttcactatgttgccaagtggaagggaatcacgtttatgactagtagacagggactcggtgttggaggtggaacgccttatggatttgacgtgggccaatctgagaggggagcggtccttaaaggattagatcttggggttgaaggcatgcgtgtaggaggccagcgtttgctagtagttcctcctgagctagcatatggtagtaagggagtacaagaaattcctccaaatgcaaccatagagttggatgttgaactgctggccatcaagcaaagcccctttgggtctcccgtaaaagttattgaaggttaa

SEQ ID NO: 140 - protein, 237 aa, Populus trichocarpa
MELISLFPSYHQNPTAILLREPLLSIPITKRRLSNGNSGALKCRSSPSSSDDETTKPTPLSLHQEGRRALVASLLSTAVGIYVCDVAEAASTSRRALRASKIPESDFTTLSNGLKYYDLKVGGGPKAVKGSRVAVHYVAKWKGITFMTSRQGLGVGGGTPYGFDVGQSERGAVLKGLDLGVEGMRVGGQRLLVVPPELAYGSKGVQEIPPNATIELDVELLAIKQSPFGSPVKVIEG

SEQ ID NO: 141 - DNA, 678 bp, Populus trichocarpa
atggcttcaacaaggagcttagacaaatggagtggtcatcgtcatcttcaaaatttagctgaatctaccccaaaaaaaacacaagaacaatcaaaccatgtttttctctcaaaccccacttcaagaagatgtgcgattttgatatctaccttgccttttaccctcacttcactacctcaattatctgaggccagagagagacgcaacaagaagaccatccctcttgaagactatctcactagcccagctgatggattgaagtactatgatgttctcgagggaaagggtgcagcagcagaaaagggaatgacagttcaggtgcattttgactgtctatataggggaataacagccatttcgagtcgagaatctaagcttttagctggaaatcgaataattgcacagccatatgagttcaaggttggggcaccaccaggcaaagaaaggaagcgtgaatttgtggacaacccaaatggtctattttctgcacaggctgcacccaaacctcctccagctatgtactcggtaacggaagggatgaaagttggagggaagaggactgtgattgttcctccagaggctggttatggacaaaaaggaatgaatgagattccgccaggaagttcatttgaattgaacattgagcttctgcaagtaatgccagctgaaggaaagtag

SEQ ID NO: 142 - protein, 225 aa, Populus trichocarpa
MASTRSLDKWSGHRHLQNLAESTPKKTQEQSNHVFLSNPTSRRCAILISTLPFTLTSLPQLSEARERRNKKTIPLEDYLTSPADGLKYYDVLEGKGAAAEKGMTVQVHFDCLYRGITAISSRESKLLAGNRIIAQPYEFKVGAPPGKERKREFVDNPNGLFSAQAAPKPPPAMYSVTEGMKVGGKRTVIVPPEAGYGQKGMNEIPPGSSFELNIELLQVMPAEGK

SEQ ID NO: 143 - DNA, 714 bp, Populus trichocarpa
atggcttcttcttctccttcatctcttctgcttccacctggttcttcttctggcaaaactactaaaagacatggcactattaatgtctttgacaaagtccaaggtttgatgaacattaatgtgcaatgctcaaacttggaccttagaattagagcaagagagaagaagatggatacaagtttgatgaagagaagagatcatgtaattgggctggtattaggggtttcaagtctttgtaatataggcttatttgatgatactgccaaagcagctggattgccaccagaagataagccaagattatgtgatgaaaactgtgagaaagagcttgaaaatgtgccaatggtgactacagagtctggattgcagttcaaggatattaaagttggtcgaggccctagtcctccagttggttttcaggttgctgctaattatgttgccatggttccatctgggcaaatttttgacagttcattggagaaagggcagctctatatctttcgtgttggctctgatcaggtgatcaagggacttgatgaagggatcctgagcatgaaagttggagggaagcggcggctctacattccaggactgttggctttcccgaaaggactcacttcagctccaggaaggccaagggtggcaccaaatagtcctgtagttttcgatgtcagtttggaatacataccaggccttgaagtggaagaagaataa

SEQ ID NO: 144 - protein, 237 aa, Populus trichocarpa
MASSSPSSLLLPPGSSSGKTTKRHGTINVFDKVQGLMNINVQCSNLDLRIRAREKKMDTSLMKRRDHVIGLVLGVSSLCNIGLFDDTAKAAGLPPEDKPRLCDENCEKELENVPMVTTESGLQFKDIKVGRGPSPPVGFQVAANYVAMVPSGQIFDSSLEKGQLYIFRVGSDQVIKGLDEGILSMKVGGKRRLYIPGLLAFPKGLTSAPGRPRVAPNSPVVFDVSLEYIPGLEVEEE

SEQ ID NO: 145 - DNA, 738 bp, Populus trichocarpa
atggcttcttcttcttcttctccttcatctcttctgctcccacttggttcatcttctggcaaaactactctacttaccaaaagacatggcattgtcaatgtctttgacaaagtccaaggtttgatgaacattagtgtgcaatgctcaaacttggaaccaagaagtagaggttcaagagcaagagagaagaaggtggatacaagtttgattaagagaagggattgtgtaattgggctggtatttggggtttcaactctttgtaatataggctcatttgataatgttgccaaaggagctggattgccaccagaagataagccaagattgtgtgatgaaacctgtgagaaagagctagaaaatgtgccaatggtgactacagagtctgggttgcagttcaaggacattaaagttggtcaaggccctagtcctccagttggttttcaggttgctgctaattatgttgccatggttccatctgggcaaatatttgacagttcattggagaaagggcagatctatatctttcgtgttggctccggtctggtgatcaagggacttgatgaagggatcctaagcatgaaagttggagggaagcgccggctctacattcccggaccgctggcattcccaaaaggactcacttcagctccaggaaggccaagggtggcaccaaatagtcctgtagttttcgatgtcagtttggaatacataccaggccttgaagtggaggaagaatga

SEQ ID NO: 146 - protein, 245 aa, Populus trichocarpa
MASSSSSPSSLLLPLGSSSGKTTLLTKRHGIVNVFDKVQGLMNISVQCSNLEPRSRGSRAREKKVDTSLIKRRDCVIGLVFGVSTLCNIGSFDNVAKGAGLPPEDKPRLCDETCEKELENVPMVTTESGLQFKDIKVGQGPSPPVGFQVAANYVAMVPSGQIFDSSLEKGQIYIFRVGSGLVIKGLDEGILSMKVGGKRRLYIPGPLAFPKGLTSAPGRPRVAPNSPVVFDVSLEYIPGLEVEEE

SEQ ID NO: 147 - DNA, 738 bp, Populus trichocarpa
atggcctccatttcaactcttggaattccattccaatcccctggaagagcttcaacatccacaagatgttgcagaccgattgcaactctaacttctcatcatccagatgtttgtattaaaaaatgtgccggggtcatcgagagaagacaagttataatgttatctgttgggttactggccggagcagctctgcagcattcttcttcaaataaagatgctgcagctatggcagccgaattcactgacatgccagctctcagggggaaggattatggcaaaacaaaaatgcggtatccggactacacagaaacagaatcaggtcttcagtataaggacttgcgagcaggaaatggtcccttgcctaagatgggagagacggttgtggtcgattgggatggttacaccataggatactatggtcgcatatttgaagctcgaaacaagacaaaaggtggctcctttgagggagatgacaaggacttcttcaaattcagactaggatccagagaggttatacctgcttttgaagaagctgtttcaggaatggccccgggtggcattagaaggatcattgtgcccccagaactaggatatcctgagaatgactacaacaagagtgggccaagaccaacaacattttcgggtcaacgagccttggattttgtgttgaggaaccaagggctgatagacaaaactttgctgttcgatattgaactccttaaagtaatcccaggctaa

SEQ ID NO: 148 - protein, 245 aa, Populus trichocarpa
MASISTLGIPFQSPGRASTSTRCCRPIATLTSHHPDVCIKKCAGVIERRQVIMLSVGLLAGAALQHSSSNKDAAAMAAEFTDMPALRGKDYGKTKMRYPDYTETESGLQYKDLRAGNGPLPKMGETVVVDWDGYTIGYYGRIFEARNKTKGGSFEGDDKDFFKFRLGSREVIPAFEEAVSGMAPGGIRRIIVPPELGYPENDYNKSGPRPTTFSGQRALDFVLRNQGLIDKTLLFDIELLKVIPG

SEQ ID NO: 149 - DNA, 777 bp, Populus trichocarpa
atggctaccttctttgggtctccaccatttctttcccatccgttaacaagaactaacttttcttcgtcatcacaaacacctccgcctcccaccccacctatcccaccctcgcagccaaatccatctccacagctaagcagcagttcatctgagcaaccgctgctaccagcctcggttagagtgcaacagcagaagcctgctaaacctgctggcaattctgctaccaaagttgaaaccactgactggatagcttccacattaactaggcggttcggccttggtgctggcctagcatgggcagcctttcttgcagttggtgtggtttcagaacaaatcaagacccgcatcgaagtctcccaacaagaagcaaatacaagaaatgttggtaaagaggaagaggtagcattacctaatggcataaggtactatgagttgagagtaggtggcggggcttctccaaagacaggggacttagtggtgattgatctcaaggggaaaattgaaggcagtggagaagtgtttgtggacacatttggcggtgacaggaaaccattggctttagtaatggggtcaaggccttatagcaagggaatgtgtgaaggggtagaatatgtactgagatcagtgaaggctggaggcaaaaggagagttatagtccctcctaatttaggttttagagagaatggtgcagatttaggcaccggtgtgcagattccaccatttgcaactcttgagtatattgttgaggttgagagagtttccattgcaccagcttaa

SEQ ID NO: 150 - protein, 258 aa, Populus trichocarpa
MATFFGSPPFLSHPLTRTNFSSSSQTPPPPTPPIPPSQPNPSPQLSSSSSEQPLLPASVRVQQQKPAKPAGNSATKVETTDWIASTLTRRFGLGAGLAWAAFLAVGVVSEQIKTRIEVSQQEANTRNVGKEEEVALPNGIRYYELRVGGGASPKTGDLVVIDLKGKIEGSGEVFVDTFGGDRKPLALVMGSRPYSKGMCEGVEYVLRSVKAGGKRRVIVPPNLGFRENGADLGTGVQIPPFATLEYIVEVERVSIAPA

SEQ ID NO: 151 - DNA, 753 bp, Populus trichocarpa
atggattgcccacttcaggacagtctactacgggttcattacaagggtatgctgcttaatgaagaaaagacagtcgtcattgatacaagaattgataatgatggtcagcctttggagttcagctctggagaagggcttgtgcctgaaggttttgaaatgtgtgtgcgcttaatgcttcctggagaggtagctcttgttacttgccctcctgactacgcatatgacaagtttaccagaccggcaaatgttcctgaaggtgctcatattgaatgggaaattgagcttcttggttttgagatgccaaaggattggactggtttggactttcagggtgtaatggatgaagcagagaagatcagaaccacaggaaacaggcttttcaaagaaggaaagtttgagcttgctaaggcaaaatatgagaaggttcttcgagaatttaatcatgttaatccacaagatgacgaggaagggaaagttttcctgaatacaagaaatttgttaaatctaaatgtcgctgcatgccacctcaaattaggggaatgcagaaagtccattgagacatgcaataaggttctggaagcaaatcctgcacacgtcaaggccctttatcgccgtggaatggcctacatggaagttggagattttgaggaagcaagaagtgattttgaaatgatgttgaaagtcgacaaatcatctgaacttgatgcaacagcagctcttaaaaaactgaagcagaagcagcaggtgggttaa

SEQ ID NO: 152 - protein, 250 aa, Populus trichocarpa
MDCPLQDSLLRVHYKGMLLNEEKTVVIDTRIDNDGQPLEFSSGEGLVPEGFEMCVRLMLPGEVALVTCPPDYAYDKFTRPANVPEGAHIEWEIELLGFEMPKDWTGLDFQGVMDEAEKIRTTGNRLFKEGKFELAKAKYEKVLREFNHVNPQDDEEGKVFLNTRNLLNLNVAACHLKLGECRKSIETCNKVLEANPAHVKALYRRGMAYMEVGDFEEARSDFEMMLKVDKSSELDATAALKKLKQKQQVG

SEQ ID NO: 153 - DNA, 777 bp, Populus trichocarpa
atgctgacagcaacctcatcgttctatcctctcctgtctaagccatcttctcctcacataaaccttataccatgtcctgctttgggagatctcttttctttgaagaagcgaatggtacggtgttgtcacaacttgaatgatggaatgcagaatggacatgtagtattatgtcatgaagagaaattgaggcgtaggttcctcctcttcttttctttctcatcaggcttgctttcaacttttccttcttatggaaagacaaagagcaagaacccgtatgacgaaagacgcttgctggaacaaaacaagcggatccagaaagagaacaatgtacctgaagacttcccaagttttatcagagaaggttttgaggttaaggtagtagcaccagagaattatataaaacgtgactcagggcttatataccgggattttgaagttggtgaaggtgattgcccaaaggatggccaacaggtgactttccactatgttggctataatgagtcaggtcgtcgcattgacagcacctacttacagggttctcctgcgaaaatccgcatgggcactaatgcattgattccaggatttgaggaaggaattcgagacatgagacctggggggaagaggaggataatcgttcctccagaacttgggccaccggttggaccttccacttttttcagctcaaaacagttcgaagtttttgatgtggaacttctcaacgttaaggactgtcaaaggaggactataggattttactctgatgttgtgtgcaactga

SEQ ID NO: 154 - protein, 258 aa, Populus trichocarpa
MLTATSSFYPLLSKPSSPHINLIPCPALGDLFSLKKRMVRCCHNLNDGMQNGHVVLCHEEKLRRRFLLFFSFSSGLLSTFPSYGKTKSKNPYDERRLLEQNKRIQKENNVPEDFPSFIREGFEVKVVAPENYIKRDSGLIYRDFEVGEGDCPKDGQQVTFHYVGYNESGRRIDSTYLQGSPAKIRMGTNALIPGFEEGIRDMRPGGKRRIIVPPELGPPVGPSTFFSSKQFEVFDVELLNVKDCQRRTIGFYSDVVCN

SEQ ID NO: 155 - DNA, 867 bp, Populus trichocarpa
atggctgcggaggacggtacggcgcaagaatatgtgccacagaagaagaataaagagcctaccgagaccgagaagaggagaaagaaaattgtgcctggaagtttaatgaaagctgaaattagaccaggaggaggtgatgcgagaccatctgatggtgatcaggtcatatatcattgcactgttaggacattagctggagttgttgttgagtctacaagatcagaatatggaggcaagggcactccaatacgacaggttttgggaaaaagcaagatgttattaggattacttgaagggcttccaacaatgttgagtggtgaagttgcaatgttcaagatgaaacctcaaatgcattattctgaggcggactgtccagtttcacctccaagtagctttccaagggatgatgaacttcattttgagattgagatgatagacttttcgaaagtcaaggttgtcagtgatgatttaggagtcataaagaaggtaatagatgaagggcagggttgggagtcgccaagagaaccatatgaagtaaaagcttggatttctgcgaagacaggagatgacaaagtaattctatcgcccaaacaaggagaaccttatttctttactattggaaaatctgaggtacctaaaggtcttgagatgggaattggaactatgacacgagaagagaaggcagtaatatatgttaccaatcagtacttgactgaatctccgctcatgtccgtggtaggtcttgaggaagttcagttcgaagtagagcttatccatttcactcaggtgagggacatgcttggagatggacgcttgataaagcgtcggcttcgtgatggaaaaggtgtggattcagagtttatttaa

SEQ ID NO: 156 - protein, 288 aa, Populus trichocarpa
MAAEDGTAQEYVPQKKNKEPTETEKRRKKIVPGSLMKAEIRPGGGDARPSDGDQVIYHCTVRTLAGVVVESTRSEYGGKGTPIRQVLGKSKMLLGLLEGLPTMLSGEVAMFKMKPQMHYSEADCPVSPPSSFPRDDELHFEIEMIDFSKVKVVSDDLGVIKKVIDEGQGWESPREPYEVKAWISAKTGDDKVILSPKQGEPYFFTIGKSEVPKGLEMGIGTMTREEKAVIYVTNQYLTESPLMSVVGLEEVQFEVELIHFTQVRDMLGDGRLIKRRLRDGKGVDSEFI

SEQ ID NO: 157 - DNA, 1014 bp, Populus trichocarpa
atggattgcccacttcaggacagtctactacgggttcattacaagggtatgctgcttaatgaagaaaagacagtcgtcattgatacaagaattgataatgatggtcagcctttggagttcagctctggagaagggcttgtgcctgaaggttttgaaatgtgtgtgcgcttaatgcttcctggagaggtagctcttgttacttgccctcctgactacgcatatgacaagtttaccagaccggcaaatgttcctgaaggtgctcatattgaatgggaaattgagcttcttggttttgagatgccaaaggattggactggtttggactttcagggtgtaatggatgaagcagagaagatcagaaccacaggaaacaggcttttcaaagaaggaaagtttgagcttgctaaggcaaaatatgagaaggttcttcgagaatttaatcatgttaatccacaagatgacgaggaagggaaagttttcctgaatacaagaaatttgttaaatctaaatgtcgctgcatgccacctcaaattaggggaatgcagaaagtccattgagacatgcaataaggttctggaagcaaatcctgcacacgtcaaggccctttatcgccgtggaatggcctacatggaagttggagattttgaggaagcaagaagtgattttgaaatgatgttgaaagtcgacaaatcatctgaacttgatgcaacagcagctcttaaaaaactgaagcagaagcagcaggatgtcgagaagaaggcacggagacaatttaaaggactatttgacaagaagccaggggaaattgcagatgctggaactgacgacagaggagaagagcagagtacaagtgaaaatcagaagaatggtgatcaggaggattcaaatgggactgacacagaggatgttgaagatgtggccgatgaacctagagaaggattgttctcccgcttgtggccaactggtagaagattgttttcagctctcgggcttcaaagatgtgcgatattgtga

SEQ ID NO: 158 - protein, 337 aa, Populus trichocarpa
MDCPLQDSLLRVHYKGMLLNEEKTVVIDTRIDNDGQPLEFSSGEGLVPEGFEMCVRLMLPGEVALVTCPPDYAYDKFTRPANVPEGAHIEWEIELLGFEMPKDWTGLDFQGVMDEAEKIRTTGNRLFKEGKFELAKAKYEKVLREFNHVNPQDDEEGKVFLNTRNLLNLNVAACHLKLGECRKSIETCNKVLEANPAHVKALYRRGMAYMEVGDFEEARSDFEMMLKVDKSSELDATAALKKLKQKQQDVEKKARRQFKGLFDKKPGEIADAGTDDRGEEQSTSENQKNGDQEDSNGTDTEDVEDVADEPREGLFSRLWPTGRRLFSALGLQRCAIL

SEQ ID NO: 159 - DNA, 1119 bp, Populus trichocarpa
atggaggagattcaagagcacgaaagccaaacgattggcaaagatgatgaggatgaaatagttgtggaacaagctgcgggtgtgcatggtgaccctgtgcaacatggggattttcctccgaaagtcgactccgcagtcgaaatccttcaagagaaagtcactaagcaagtcgttaaggaaggtcatggtcagaagccatgcaaatatgcaacatgctttttgcactacagggcatggactgaaagcacccagcacaagtttgaagatacatggcatgaacaacgaccatttgaaatggttttaggaaaagagaagaaagaaatggctggtttagctgttggtgtgtccagtatgaaggctggtgaacgtgccctattacatgtgggctgggaactggggtatgggaaagaaggaagcttttctttcccaaatgttcctcccatggcagatataatatatgaagttgagcttattggatttgatgaagtcagagaagggaaagcacgtggtgacatgactgcagaagagaggattggtgcagcggatcgaagaaaaatggatggaaattctttatttaaggacgagaaacttgaggaggccatgcagcagtatgaaatggccattgcatatttgggcgatgacttcatgtttcaactgtttggcaagtatcgagacatggcattggcagttaagaatccatgtcatcttaacatggcggcttgcctgataaagcttaagcggcatgaagaagccattgcacaatgcacaattgtactggcagaggatgaaaacaatgctaaggctctgttcaggagaggaaaagccagggcagagcttgggcagacagatgctgcccgggaagactttctcaaggcacggaaacatgcacctgaagacaaggcaattacgagggagctgcgcttgctggatgagcatgataaagctatatataagaagcaaaaggagatatataaaggaatttttggaccaccaccacggccaaagcccaagccagctaatttgctgacccgcatgtggcaatggctaaccctcatctgccaatggctgctttcactaatttatcgcctcttcaagcgtgaaaggcgcaaagccgattag

SEQ ID NO: 160 - protein, 372 aa, Populus trichocarpa
MEEIQEHESQTIGKDDEDEIVVEQAAGVHGDPVQHGDFPPKVDSAVEILQEKVTKQVVKEGHGQKPCKYATCFLHYRAWTESTQHKFEDTWHEQRPFEMVLGKEKKEMAGLAVGVSSMKAGERALLHVGWELGYGKEGSFSFPNVPPMADIIYEVELIGFDEVREGKARGDMTAEERIGAADRRKMDGNSLFKDEKLEEAMQQYEMAIAYLGDDFMFQLFGKYRDMALAVKNPCHLNMAACLIKLKRHEEAIAQCTIVLAEDENNAKALFRRGKARAELGQTDAAREDFLKARKHAPEDKAITRELRLLDEHDKAIYKKQKEIYKGIFGPPPRPKPKPANLLTRMWQWLTLICQWLLSLIYRLFKRERRKAD

SEQ ID NO: 161 - DNA, 1110 bp, Populus trichocarpa
atggaggagattccaagccaatcgattggtaaagatgatgaaaatgaaagagctatggaagaagctgcggttgtgcgtggtgagcctttgcaagatgggaatcatcctccgaaagtcgaatccgcggttgaaatacttcaagagaaagtcaccaagcaaatcattaaggaaggtcatggtcagaagccaaccaaatatgcaacatgctttttgcactacagggcatggacagaaagcactcagcacaagttcgatgatacatggcatgaacaacgaccatttgaaatggttttaggaaaagagaagaatgaaatggcgggtttagctgttggtgtttccagtatgaaggctggtgaacgtgccctcttacatgtgggctgggaattaggctatgggaaagaagggaacttttctttcccaaatgttcctcccatggcagatataatatatgaagtcgagcttataggatttgatgaagtcaaagaagggaaagctcgtggtgatatgactgcagaagagaggatcggtgcagcagatcgaagaaaaatggatggaaattctctatttaaggaggaaaaacttgaggaggctatgcagcagtatgaaatggcaattgcatatttgggcgacgactttatgtttcagctgtttggcaagtaccgagacatggcattggcagtgaagaatccatgtcatcttaacatggcggcttgtctgatcaagcttgagcgctatgaagaagccattgcacaatgcaccattgtactggtagaggatgaaaacaatgctaaggctttgttcagaagagggaaagccagagcagagcttgggcagacagatgctgcccgggaagactttctcaaggcacgtaaacatgcacctgaagacaaggcaattttgagggagttgcgtttgctggatgagcatgataaagctatatataagaagcaaaaggagatatatagagggattttcggaccaccaccacagccaaaaccgaagccaactaatgtgctgattcgcatatggcaatggtcaatcctcgtctgccaatggctgctatcactgatttatcgcctcttcaggcgtgaaaggcacaaagccgactaa

SEQ ID NO: 162 - protein, 369 aa, Populus trichocarpa
MEEIPSQSIGKDDENERAMEEAAVVRGEPLQDGNHPPKVESAVEILQEKVTKQIIKEGHGQKPTKYATCFLHYRAWTESTQHKFDDTWHEQRPFEMVLGKEKNEMAGLAVGVSSMKAGERALLHVGWELGYGKEGNFSFPNVPPMADIIYEVELIGFDEVKEGKARGDMTAEERIGAADRRKMDGNSLFKEEKLEEAMQQYEMAIAYLGDDFMFQLFGKYRDMALAVKNPCHLNMAACLIKLERYEEAIAQCTIVLVEDENNAKALFRRGKARAELGQTDAAREDFLKARKHAPEDKAILRELRLLDEHDKAIYKKQKEIYRGIFGPPPQPKPKPTNVLIRIWQWSILVCQWLLSLIYRLFRRERHKAD

SEQ ID NO: 163 - DNA, 1089 bp, Populus trichocarpa
atgtattccccttcgcctgttcccaaaagtggagttgtaattgaggagataactgaagatgacaaacctacaaaagaaaatggcaagtctaaacggctaaagaagaagaataatcaatcaagtgacaaggaagaccaaaacaactctcaacaacaaattgttcttaagagggatagaggtatttctgttctggaaagtgaagatgaagatggttttccaatttcttcctctgcaaaaagcaaagatacagttcaggagcagcaagcagaactagatggacaaaaagataaggaaacaacccaagagactaagaaaaagatggcaagtgaggataatgatgacactagaaaaaagagaaaagttaaaagcgttgatcaagatggtcaaccagaaaggaaaacaaagaaaaagaagaagcagagagaacgaggtacagaggcaaaggttgatgaaatggatgacaaggaagagatcaacaatgcctctagagatgaaatcgagtccaagcaagtgaaaaagcaggattctaccaaccgaaacaaacatgaacagagggaccttgacactgatgcagatagtatgcccggtgaagattcatcggataagaaaaagaagaagaataagaagaagaaaaagacccaggatagtggagcaacaactaatgatcaagctgtttcagctgcgggaggtgaagccaagtcttcattggagtctgaggataagcaatctacagccaagtcctcacaagttagaaccttttcaaatggattggttattgaagaattagcaatgggcaaaccagatggtaaacgagcttctcctggaagtcaggtcagtgtgcactatattggtaagctgaagaacggaaaaatatttgactctaatgtcgggagggctccctttaaattccgcctaggtgttggacaagtcataaaaggatgggatgttggagttaatggtatgcgagttggggacaaaagaagactcacaattccaccatcgatgggttacggagatcggggtgctggtgggaagatacctccaaactcatggcttgtgtttgatgttgagttggtgaacgctcgttga

SEQ ID NO: 164 - protein, 362 aa, Populus trichocarpa
MYSPSPVPKSGVVIEEITEDDKPTKENGKSKRLKKKNNQSSDKEDQNNSQQQIVLKRDRGISVLESEDEDGFPISSSAKSKDTVQEQQAELDGQKDKETTQETKKKMASEDNDDTRKKRKVKSVDQDGQPERKTKKKKKQRERGTEAKVDEMDDKEEINNASRDEIESKQVKKQDSTNRNKHEQRDLDTDADSMPGEDSSDKKKKKNKKKKKTQDSGATTNDQAVSAAGGEAKSSLESEDKQSTAKSSQVRTFSNGLVIEELAMGKPDGKRASPGSQVSVHYIGKLKNGKIFDSNVGRAPFKFRLGVGQVIKGWDVGVNGMRVGDKRRLTIPPSMGYGDRGAGGKIPPNSWLVFDVELVNAR

SEQ ID NO: 165 - DNA, 1518 bp, Populus trichocarpa
atgagcttttggggcattgaagtgaaaccaggcaagccttacccttatcactctgatgatgtgcaaggaaatcttcgggtaacacaggcaactttgggccttggctcgtcagaagaaaggtgcatactccagtgttcagttggacacaagagtccaattttcttatgttcattgctaccagggaaagctgaaagttgctctttgaatcttgaattttctgatgagttagtagcgttctctgtgattggaccacgaagcattcatctttgtggttattttgattctgaaaaaggagatcacctccgagatgaatatgaatatgattcgggtgagactattgctgacacggaatcagacgagtccagcgaatatgattatgatgatgaatatgatgacgacttcattgatgatgacaatgatcttcaaatttatcccccctcgcctgttcccaaggtggaggagataactgaagatgacaaacctaaaaaagaaaatggcaagtctaaacgaataaagaagaagaagaataatcaatcaagtgaccaggaagaccaaaacaattcccaacgacaaattgttcttaagagggatgcaggtatttcagttctggaaagtgaagatgaagatggttttccaatttcttcctcggcaaaaagaaaagttactgttcaggagccccaagcagaaataaatggacaaaaagataaggaaacaacccaagaaacaaagaagaagatagatagagaggataatgatgacactactggaaaaaagagaaaggttaaaagcattgatgaagactgtcaaccagaaagcaaaacaaagaagaagaagaagaagaagcagagagaacaaggtgcagaggaaaagattgatgaaatggatgacaaggaagagaacaacaatgcctctagagatgaaatcaagcctgaggaagtgaaaaggcaggattctaccgatggaaacaaacgcaatcagaggggccttgacactgatgcaggtagtatgcctggtgaagaatcatctgataaaaaaaagaagaaaaagaagaagaagaagaaggcccaggatagtggaacaacaactaaggaacaagctgtttcagctgtgggaggtgaagccaaatcgttgttggattccgatgataagcaatctacaaccaagtcttcacaagctagaaccttctcaaatggattggttattgaagaattatcaatgggaaaaccagatggtaaacgtgcttctcccgggagtcaggtcagtgtgcactacatcggtaagctgaagaagaatgacaagatatttgactctaatgtcggaagagctccctttaaattccgcctaggtgtcggacaagtcataaagggatgggatgttggagttaatggcatgcgggttggtgacaaaaggagactcacaattccaccatcgatgggttacggagaacagggtgctggtgggaaaataccgccacactcatggcttgtctttgatgttgagttggtgaacgttcggtga

SEQ ID NO: 166 - protein, 505 aa, Populus trichocarpa
MSFWGIEVKPGKPYPYHSDDVQGNLRVTQATLGLGSSEERCILQCSVGHKSPIFLCSLLPGKAESCSLNLEFSDELVAFSVIGPRSIHLCGYFDSEKGDHLRDEYEYDSGETIADTESDESSEYDYDDEYDDDFIDDDNDLQIYPPSPVPKVEEITEDDKPKKENGKSKRIKKKKNNQSSDQEDQNNSQRQIVLKRDAGISVLESEDEDGFPISSSAKRKVTVQEPQAEINGQKDKETTQETKKKIDREDNDDTTGKKRKVKSIDEDCQPESKTKKKKKKKQREQGAEEKIDEMDDKEENNNASRDEIKPEEVKRQDSTDGNKRNQRGLDTDAGSMPGEESSDKKKKKKKKKKKAQDSGTTTKEQAVSAVGGEAKSLLDSDDKQSTTKSSQARTFSNGLVIEELSMGKPDGKRASPGSQVSVHYIGKLKKNDKIFDSNVGRAPFKFRLGVGQVIKGWDVGVNGMRVGDKRRLTIPPSMGYGEQGAGGKIPPHSWLVFDVELVNVR

SEQ ID NO: 167 - DNA, 1728 bp, Populus trichocarpa
atggaagaagacttcgagcttcctaccggagacgagatgatgatgaacaacggcgaccagcttgatctcccagacgaaggtccgatgctgaaggtaggtgaagagaaggagatcggcaaccaaggcttgaaaaagaagcttctcaaggaaggtgaaggttgggacactcctgataacggcgacgaagtcgaagttcattacacggggacgcttttggacggaactcagtttgattcgagtagggacagagggacgccgttcaagttcactcttggtcaaggccaagtgattaaaggatgggacctaggtatcaagacaatgaagaaaggtgaaaatgcccttttcaccattcctgctgacttggcgtatggttcttctggctcacctccaactattcctcccaatgccacactccagtttgatgttgaattgctgtcctggagcagcatcaaggacatctgtaaggatggtgggatatttaagaagatacttgttgaaggagagaaatgggagaatccgaaggaccttgatgaagtgttagttcggtatgaagctcaactcgaggatggttcagttattgctaggtctgacggagtagagttcactgttaaggatggtcatttctgtcctgcactggcaagagctgtgaagacaatgaagatgggggagaaggttctcttaacagtgaagccacaatatggatttggggagaagggtaagccagcatctggcgatgaaagtgctgttccacctaatgctaatattcagattactctggagttggttgcctggaagactgtgacggaggtaactgatgacaagaaggttataaagaaaatcttgaaggaaggcgatggatatgatcgcccaaatgagggggctgttgtaaaagtgaaattgattgggaagttgcaagatggcacagtattttttaagaagggacaagacgacagtgagttgtttgagttcaagacagatgaagagcaagtaattgatggacttgatagagctgtgtctacgatgaagaaaggtgagctagcccttttgaccattgcaccggagtatgcatttggctcatctgagtcgcagcaggagctggctgttgttcctccaaactctactgtgtgctatgagatagagctggtttccttcgataaggagaaggaatcatgggacatgaatactgatgagaagattgaagctgctggcaaaaagaaggaagagggcaatgtgttgttcaaggctggaaaatatgcaaaggcatctaaaagatatgagaaggctgtgaagtatatagaatatgattcttcttttagcgaggaggagaaaaagcaggcaaaggcactgaaggtggcctgcaacctaaacaacgctgcctgcaaactgaaattaaaggattacaaacaggcagagaagttgtgcaccaaggtattagagttggagagtagaaatgtgaaggctctctacagaagagcccaggcttatattcagctggcagatttggatctggctgagtttgatattaagaaagctcttgagattgatcctgacaacagggatgtcaagctggagcacaaaactttgaaagaaaagatgaaggaatacaataagaaggaagccaagttttatggcaacatgtttgccaagatgtctaaggtgggatctcttgaatctaataaagcagaagctaaggaggcagagcccatgagtgtagacagcgaggcatga

SEQ ID NO: 168 - protein, 575 aa, Populus trichocarpa
MEEDFELPTGDEMMMNNGDQLDLPDEGPMLKVGEEKEIGNQGLKKKLLKEGEGWDTPDNGDEVEVHYTGTLLDGTQFDSSRDRGTPFKFTLGQGQVIKGWDLGIKTMKKGENALFTIPADLAYGSSGSPPTIPPNATLQFDVELLSWSSIKDICKDGGIFKKILVEGEKWENPKDLDEVLVRYEAQLEDGSVIARSDGVEFTVKDGHFCPALARAVKTMKMGEKVLLTVKPQYGFGEKGKPASGDESAVPPNANIQITLELVAWKTVTEVTDDKKVIKKILKEGDGYDRPNEGAVVKVKLIGKLQDGTVFFKKGQDDSELFEFKTDEEQVIDGLDRAVSTMKKGELALLTIAPEYAFGSSESQQELAVVPPNSTVCYEIELVSFDKEKESWDMNTDEKIEAAGKKKEEGNVLFKAGKYAKASKRYEKAVKYIEYDSSFSEEEKKQAKALKVACNLNNAACKLKLKDYKQAEKLCTKVLELESRNVKALYRRAQAYIQLADLDLAEFDIKKALEIDPDNRDVKLEHKTLKEKMKEYNKKEAKFYGNMFAKMSKVGSLESNKAEAKEAEPMSVDSEA

SEQ ID NO: 169 - DNA, 1608 bp, Populus trichocarpa
atggaacacttgtccttgagttcctctttgcaaaatgaaatccaaaccgataattcgggattgcccgagaaaaaaatcggaagccaagggctaaggaaaaagattgtgaagaagggaaactcatggcaaactccatttcctggagatgaagtggaagttcatttcaatggatatatcgaagggggggcaagtcttgagtcaagtcgtgataaaggggttccctttaagttcaaattaggccagggagaagtaatcaaaggatgggatgaaggggttgccaccatgaagaatggagaaagagcaatttttacggtaccgccaaacttggcctacggggaggctggttctccaccactgattcctcccaatgcaactcttgtttttgatgttgagatgctgtcttggagtagcatcagggatttaacaggcgatggaggaatattgaagaagctaatgaaggagggtgaaggatgggctacaccaagagatggagatgaagttttagtgaagtatgaggcaaggattgagactggaatgcttgtctccaaatccgaggaaggtgttgagtttcatgtaggagatggctatctatgtcctgccgtgagcagagcagtgaagacaatgagaaagggtgagaaagcagagctagcagtaaacctttcttatggcttcattcaaaaaggaaatttagctcctgacattgaaagtaacattccaccttattctaatttaaccatccaacttgagcttgtatcatggagaagtatcaccgatgtcaccggagataagaaggtccttaaaaaaattgtaaaagccggtgaaggattcgatcgtccgaccgagggatcccatgtgaaagtgacatatgttggaaaacttgaagatggaacagtttttgacaggaaagggactaatggagagccatttgaattcataactttggaagaacaagtaaatgagggtctagacagggccataatgactatgaagaaaggagagcatgccacagtgaccgtggatgccaaatatctccatggccatgacatttcaggaatgcttcctgcaaattccatgcttcattatgaagttgagctgcttgattttattaaggagaaaccattctggaaaatggatacacatgagaaactagaagcaagtgaaaggaagaagctagatggcaatgtgctattcaaggcaggaaaattctggcgtgcctctaagaaatacgagaaggctgcaaaatacatcgagttcgaccactctttcactgatgaggaaatgtgcctggcaaaaagcttgaggctatcatgttacctgaataacgcagcttgtaagcttaaatcaggggagttccttgaagcttcaaggctatgcacgaaggttttagaacttgatccactcaatgtcaaagctctattcagacgatcgcaagcatacttgaaaacatctgaattagagaaagctgaggcagatataaagaaagctctagccattgatccaaataatagagaagtgaaacttgggttcaaggagcttaaagacaagcaaagagagtatgagaaatatcaagctgagcttttcagcaccatggtttcaaggatgggttga

SEQ ID NO: 170 - protein, 535 aa, Populus trichocarpa
MEHLSLSSSLQNEIQTDNSGLPEKKIGSQGLRKKIVKKGNSWQTPFPGDEVEVHFNGYIEGGASLESSRDKGVPFKFKLGQGEVIKGWDEGVATMKNGERAIFTVPPNLAYGEAGSPPLIPPNATLVFDVEMLSWSSIRDLTGDGGILKKLMKEGEGWATPRDGDEVLVKYEARIETGMLVSKSEEGVEFHVGDGYLCPAVSRAVKTMRKGEKAELAVNLSYGFIQKGNLAPDIESNIPPYSNLTIQLELVSWRSITDVTGDKKVLKKIVKAGEGFDRPTEGSHVKVTYVGKLEDGTVFDRKGTNGEPFEFITLEEQVNEGLDRAIMTMKKGEHATVTVDAKYLHGHDISGMLPANSMLHYEVELLDFIKEKPFWKMDTHEKLEASERKKLDGNVLFKAGKFWRASKKYEKAAKYIEFDHSFTDEEMCLAKSLRLSCYLNNAACKLKSGEFLEASRLCTKVLELDPLNVKALFRRSQAYLKTSELEKAEADIKKALAIDPNNREVKLGFKELKDKQREYEKYQAELFSTMVSRMG

SEQ ID NO: 171 - DNA, 1734 bp, Populus trichocarpa
atggaggaagactttgagttcccaactggaagcaacaacatggaacttgaagatgaaatggacatgggtatcccggacccagatgaagctgttatcaaggtgggtgaagagaaggagattggcaaaaatgggctgaaaaagaagctcgttaaggaaggtgaaggctgggatacccccagtgccggtgatgaagttgaagtgcactacactggaactttagttgatggaacccagtttgattcgagccgtgagagagggactccatttaagttcaagcttggccaagggcaagtaattaagggatgggatgagggcatcaaaactatgaaaaagggcgagaatgctgtttttactatacctccagagttggcgtatggtgaatctggctctcctccaactattcctcccaatgctactcttcagttcgacgtggagttgctatcgtggacaagtgtcaaagacatatgcaaagatggaggaatctttaagaaaataattgttgagggagaaaaatgggataatcccaaagatctcgatgaagtatttgttaagtatgaagcgcggcttgaaaatggcacagttgtctcaaagtctgatggagttgaattcactgttggagaaggctatttctgtcccgccttggcaaaggctgtgaaaacaatgaagaagggggagaaagtgttgctgacagtgaaaccacaatatgggtttggagagaatggcaggacagcagcaggtgatgaaggtgctgttcctccgaatgctacccttgagataatgcttgaactgctttcctggaagactgtgtctgatgttatgaaggacaagaaggtcatgaaaaagatcctgaaggaaggagaaggttatgaacgacctgatgacgggactgttgttcaagtgaaactaattgggaagctggaagatgggactatctttgtgaagaagggccatgaagaggagccaccatttgagttcaagatagatgaagagcaagttattgatggactagatagaaccgtaaagactatgaagaaaggggaagttgctctggtgacaattcaaccagaatatgcttttggccgatctgaatctcaacaagacttggctactgttcctgtcaatgcaacagtgtactatgaagttgagatgatctccttcaccaaggaaaaggaatcttgggatatgaatacacaagagaagattgaagctgcagggaagaagaaagaagaagggaatgcatggttcaaggctggcaaatatgaaagagcctcaagaagatatgagaaggcagcgaagtttatcgagtatgactcatctttcactgacgaggagaagcagcaatcaaaggtgctgaaaatttcctgcaagcttaacaatgcagcgtgcaagctgaagctcaaggactacaaggaagctgagaagctttgctccaaggtgttagagcttgatggtaagaatgtgaaggccttgtataggagggctcaagcgtatatacagcttgtcgatttggacctggcagagatagacattaaaagggcacttgaaattgaccctgacaatagggacgtcaagctggagaacaagatcctgaaggacaaagtgagagagtacaacaagaaggaagcgcaattttatagcaacatatttgcgaagatgaataagttagagcaaacaaattcaactatggcagcaaagcaggatgcaatgccaatgaccatagatagcaaggcttaa

SEQ ID NO: 172 - protein, 577 aa, Populus trichocarpa
MEEDFEFPTGSNNMELEDEMDMGIPDPDEAVIKVGEEKEIGKNGLKKKLVKEGEGWDTPSAGDEVEVHYTGTLVDGTQFDSSRERGTPFKFKLGQGQVIKGWDEGIKTMKKGENAVFTIPPELAYGESGSPPTIPPNATLQFDVELLSWTSVKDICKDGGIFKKIIVEGEKWDNPKDLDEVFVKYEARLENGTVVSKSDGVEFTVGEGYFCPALAKAVKTMKKGEKVLLTVKPQYGFGENGRTAAGDEGAVPPNATLEIMLELLSWKTVSDVMKDKKVMKKILKEGEGYERPDDGTVVQVKLIGKLEDGTIFVKKGHEEEPPFEFKIDEEQVIDGLDRTVKTMKKGEVALVTIQPEYAFGRSESQQDLATVPVNATVYYEVEMISFTKEKESWDMNTQEKIEAAGKKKEEGNAWFKAGKYERASRRYEKAAKFIEYDSSFTDEEKQQSKVLKISCKLNNAACKLKLKDYKEAEKLCSKVLELDGKNVKALYRRAQAYIQLVDLDLAEIDIKRALEIDPDNRDVKLENKILKDKVREYNKKEAQFYSNIFAKMNKLEQTNSTMAAKQDAMPMTIDSKA

SEQ ID NO: 173 - DNA, 1827 bp, Populus trichocarpa
atggaggaagactttgagttcccaactggaagcaacaacatggaacttgaagatgaaatggacatgggtatcccggacccagatgaagctgttatcaaggtgggtgaagagaaggagattggcaaaaatgggctgaaaaagaagctcgttaaggaaggtgaaggctgggatacccccagtgccggtgatgaagttgaagtgcactacactggaactttagttgatggaacccagtttgattcgagccgtgagagagggactccatttaagttcaagcttggccaagggcaagtaattaagggatgggatgagggcatcaaaactatgaaaaagggcgagaatgctgtttttactatacctccagagttggcgtatggtgaatctggctctcctccaactattcctcccaatgctactcttcagttcgacgtggagttgctatcgtggacaagtgtcaaagacatatgcaaagatggaggaatctttaagaaaataattgttgagggagaaaaatgggataatcccaaagatctcgatgaagtatttgttaagtatgaagcgcggcttgaaaatggcacagttgtctcaaagtctgatggagttgaattcactgttggagaaggctatttctgtcccgccttggcaaaggctgtgaaaacaatgaagaagggggagaaagtgttgctgacagtgaaaccacaatatgggtttggagagaatggcaggacagcagcaggtgatgaaggtgctgttcctccgaatgctacccttgagataatgcttgaactgctttcctggaagactgtgtctgatgttatgaaggacaagaaggtcatgaaaaagatcctgaaggaaggagaaggttatgaacgacctgatgacgggactgttgttcaagtgaaactaattgggaagctggaagatgggactatctttgtgaagaagggccatgaagaggagccaccatttgagttcaagatagatgaagagcaagttattgatggactagatagaaccgtaaagactatgaagaaaggggaagttgctctggtgacaattcaaccagaatatgcttttggccgatctgaatctcaacaagacttggctactgttcctgtcaatgcaacagtgtactatgaagttgagatgatctccttcaccaaggaaaaggaatcttgggatatgaatacacaagagaagattgaagctgcagggaagaagaaagaagaagggaatgcatggttcaaggctggcaaatatgaaagagcctcaagaagatatgagaaggcagcgaagtttatcgagtatgactcatctttcactgacgaggagaagcagcaatcaaaggtgctgaaaatttcctgcaagcttaacaatgcagcgtgcaagctgaagctcaaggactacaaggaagctgagaagctttgctccaaggtgttagagcttgatggtaagaatgtgaaggccttgtataggagggctcaagcgtatatacagcttgtcgatttggacctggcagagatagacattaaaagggcacttgaaattgaccctgacaatagggacgtcaagctggagaacaagatcctgaaggacaaagtgagagagtacaacaagaaggaagcgcaattttatagcaacatatttgcgaagatgaataagttagagcaaacaaattcaactgtaaataggcaaaaccctaatttatttaagtctgttgttatggtgacattgtgcctgttgttgactgtttttcttgtgtacggtgtttggtatggaaatgcagatggcagcaaagcaggatgcaatgccaatgaccatagatag

SEQ ID NO: 174 - protein, 608 aa, Populus trichocarpa
MEEDFEFPTGSNNMELEDEMDMGIPDPDEAVIKVGEEKEIGKNGLKKKLVKEGEGWDTPSAGDEVEVHYTGTLVDGTQFDSSRERGTPFKFKLGQGQVIKGWDEGIKTMKKGENAVFTIPPELAYGESGSPPTIPPNATLQFDVELLSWTSVKDICKDGGIFKKIIVEGEKWDNPKDLDEVFVKYEARLENGTVVSKSDGVEFTVGEGYFCPALAKAVKTMKKGEKVLLTVKPQYGFGENGRTAAGDEGAVPPNATLEIMLELLSWKTVSDVMKDKKVMKKILKEGEGYERPDDGTVVQVKLIGKLEDGTIFVKKGHEEEPPFEFKIDEEQVIDGLDRTVKTMKKGEVALVTIQPEYAFGRSESQQDLATVPVNATVYYEVEMISFTKEKESWDMNTQEKIEAAGKKKEEGNAWFKAGKYERASRRYEKAAKFIEYDSSFTDEEKQQSKVLKISCKLNNAACKLKLKDYKEAEKLCSKVLELDGKNVKALYRRAQAYIQLVDLDLAEIDIKRALEIDPDNRDVKLENKILKDKVREYNKKEAQFYSNIFAKMNKLEQTNSTVNRQNPNLFKSVVMVTLCLLLTVFLVYGVWYGNADGSKAGCNANDHR

SEQ ID NO: 175 - DNA, 1722 bp, Populus trichocarpa
atgggtgtagagaaagggactcgtgattcagacattgaacacgaggaagacctcgatgaagaaccaggggaggtgatcgaatcagctcctcctctcaaggttggcgaagagagagagcttggtaattctggtataaagaagaagctcctcaagcgtggccttggctgggaaactccagaattcaatgatgaagtcactgttcattatgtgggcacattacttgatggtactaagtttgattccacaagagatagggattcatctgtgattatgaaacttggtcaaggggaagtggtggctggattggatcatgggatcattaccatgaaaaagggcgaacgtgcattgttcacgttgcctcctgaattgggctttggagtgacagggcgtgatgctgtgccgacgaattcttttgttcgatatgaggttgagcttgtttcgtggattaaggtggtggatgtgagcaaagatggtggaattataaagaaaattgtggagaagggagataagcacgaccgtcctggtgatttagatgaagtccttgtgaagtatcaggtggcccttgctgatggcactattgtggcaaaaacactagaagaaggaattgagttttatgtaaaagatggtcatttatgcccagcattgccaaaagcaaccatgaccatgaaaaggggagagaaagtcaaactagttgttcagcctcaatatgcttttggacaggaaggaaaagatgctagtgatgcaatctgtccagttccaccaaattctactctgtacattgatctggagctaacatcctttaagcctgttattgatgttactggtgatgctaaggtcttcaagaagatcctgaaagagggggagggctcccttgttgcaaatgaaggtgcaacagtaaccattagctatacagctaggctagaggatggaactgtgtttgaaagaaaaggaattgatgatgggcagcctttgcaatttataacagatgaagagcaagtgatcgcaggtttagaccgagctgtggcaacaatgaagaagggggaatatgcaatattaacagtaaagccagaatacggctttggaaacgttgaaacaaagagggatcttgctattgtacccccatcatcaatcttagtctatgaagttgaaatgtcagattttattaaggagaaaacaccatgggagatgaataatcaggagaaaattaaggctgccgagagaaagaaagaagaaggaaacctgctatttaaaagtgggaagtatctaagagctgggaaaaagtatgataaggctgcaagttatgttggtgaagaggaagtttttggggatgatgagcaaaagctggttacagcaatgagagtaacttgctggctgaacaaggcagcatgtagcctcaaacttaatgattttcagggagcaatcaagttatgttcaaaggtactggatattgagttctacaacataaaagccctttataggcgggcacaagcactgatccaaactacagatttggtctcagctgacatggacattaagaaagctcttgaagttgatcctcaaaacagggaggtgaagttaattcagaagacattgaaacaacttcaagcagaaagtaacaagagagatgcaaagctctattccaacatgtttgcggatatgacaaagcaaacatctgccataaccaaggtaaaaaagacaataaccatgtcaaacacgccttaa

SEQ ID NO: 176 - protein, 573 aa, Populus trichocarpa
MGVEKGTRDSDIEHEEDLDEEPGEVIESAPPLKVGEERELGNSGIKKKLLKRGLGWETPEFNDEVTVHYVGTLLDGTKFDSTRDRDSSVIMKLGQGEVVAGLDHGIITMKKGERALFTLPPELGFGVTGRDAVPTNSFVRYEVELVSWIKVVDVSKDGGIIKKIVEKGDKHDRPGDLDEVLVKYQVALADGTIVAKTLEEGIEFYVKDGHLCPALPKATMTMKRGEKVKLVVQPQYAFGQEGKDASDAICPVPPNSTLYIDLELTSFKPVIDVTGDAKVFKKILKEGEGSLVANEGATVTISYTARLEDGTVFERKGIDDGQPLQFITDEEQVIAGLDRAVATMKKGEYAILTVKPEYGFGNVETKRDLAIVPPSSILVYEVEMSDFIKEKTPWEMNNQEKIKAAERKKEEGNLLFKSGKYLRAGKKYDKAASYVGEEEVFGDDEQKLVTAMRVTCWLNKAACSLKLNDFQGAIKLCSKVLDIEFYNIKALYRRAQALIQTTDLVSADMDIKKALEVDPQNREVKLIQKTLKQLQAESNKRDAKLYSNMFADMTKQTSAITKVKKTITMSNTP

SEQ ID NO: 177 - DNA, 663 bp, Zea mays
atggacctctccgtcgtgccatccctctccctctccccgcgccgtgcccttccactcccggccaggagggctgcgcggcgtccggccttcgtctgccgctgcagttgctccctggacgcgtccccggtggccacccggcggttgttcgcctccctcctcgccaccgcagcagcggtgggggttggcgtggccggaggcggaggggaagccggcgcggtgtccacgagcaggagggcgctcagggcgtccaagattcctgagagcgaattcaccaccctgcccaatggcctcaagtactacgacatcaaggtaggaagtggggctgaagctgttaaaggatcccgtgttgcggtacattatgtggccaagtggaagggcatcacattcatgacaagtaggcagggtcttggtgttggtggtggaacgccatatgggtttgacgtaggcaattctgagagaggcaatgttttaaaaggattggatcttggggttgagggaatgaaagtcggaggccagaggttgataatagttcctcctgaactggcgtatggaaagaagggtgtccaggaaattcctccaaacgcaactattgagctggatgtcgagcttctatcaatcaaacagagtccattcgggactcctgtgaagatcgttgaaggatag

SEQ ID NO: 178 - protein, 220 aa, Zea mays
MDLSVVPSLSLSPRRALPLPARRAARRPAFVCRCSCSLDASPVATRRLFASLLATAAAVGVGVAGGGGEAGAVSTSRRALRASKIPESEFTTLPNGLKYYDIKVGSGAEAVKGSRVAVHYVAKWKGITFMTSRQGLGVGGGTPYGFDVGNSERGNVLKGLDLGVEGMKVGGQRLIIVPPELAYGKKGVQEIPPNATIELDVELLSIKQSPFGTPVKIVEG

SEQ ID NO: 179 - DNA, 618 bp, Zea mays
atggagctcaagtcactcgccaatccattcccgtacgcttccccgtctccaatatgccggcgtccaccggacccgaagaagaagatccggccggcgcgccgcagcagggctccgtatctgaagtcgacctgcgcgctctccaggcggagggcggtctcagacatggcggttgtcggcgcagtggccctctccacgcccacgccggcgctagcagagcagcctgacgtcaccaggtaccggaaggtggggagtggagtcatactcgaagatgtcgtcgagggggaggggcccgaggcgcgggagggcgacctggtgcagttcaactacgtgtgccgccgcgcgaacggctacttcgtgcacagcacggtggaccagttcagcggcgagagcaggccggtgacgctcgcgctcggcggtgaagagatgatccgaggcctgagagacgtcctgattgggatgaagtccggaggcaagaggagggctctgatccctcctgaagcaggctacgtcagcgagacactgaagcccataccggaggagtttggaccgaggcgaagcctgctgtcccacgccaaggagccgctggtgttcgaggttcagttgctcaaggtcctgtga

SEQ ID NO: 180 - protein, 205 aa, Zea mays
MELKSLANPFPYASPSPICRRPPDPKKKIRPARRSRAPYLKSTCALSRRRAVSDMAVVGAVALSTPTPALAEQPDVTRYRKVGSGVILEDVVEGEGPEAREGDLVQFNYVCRRANGYFVHSTVDQFSGESRPVTLALGGEEMIRGLRDVLIGMKSGGKRRALIPPEAGYVSETLKPIPEEFGPRRSLLSHAKEPLVFEVQLLKVL

SEQ ID NO: 181 - DNA, 339 bp, Zea mays
atgggcttcgagaagcagatcctgagatccggcaccggccccaagccgataaagggccagaaggtcaccgttcactgcaccggctacgggaaggatcgtgatctgtccaagaaattttggagcaccaaggaccctgggcagcagccattcagtttcagcattggtcagggttcagtgatcaaaggatgggacgagggagttatgaccatgcaagtgggtgaagttgctcgtatccagtgcacgcctgattatgcttatggagccggcgggttcccagcctggggaattcaaccaaactcagtgcttgtgttcgagattgaagtcctcagtgcccagtaa

SEQ ID NO: 182 - protein, 112 aa, Zea mays
MGFEKQILRSGTGPKPIKGQKVTVHCTGYGKDRDLSKKFWSTKDPGQQPFSFSIGQGSVIKGWDEGVMTMQVGEVARIQCTPDYAYGAGGFPAWGIQPNSVLVFEIEVLSAQ

SEQ ID NO: 183 - DNA, 267 bp, Zea mays
atgggcttcgagaagcagatcctgagatccggcaccggccccaagccgataaagggccagaaggtcaccgttcactgcaccggctacgggaaggatcgtgatctgtccaagaaattttggagcaccaaggaccctgggcagcagccattcagtttcagcattggtcagggttcagtgatcaaaggatgggacgagggagttatgaccatgcaagtgggtgaagttgctcgtatccaggtatgcccctcagacgtcgaattagtctga

SEQ ID NO: 184 - protein, 88 aa, Zea mays
MGFEKQILRSGTGPKPIKGQKVTVHCTGYGKDRDLSKKFWSTKDPGQQPFSFSIGQGSVIKGWDEGVMTMQVGEVARIQVCPSDVELV

SEQ ID NO: 185 - DNA, 1488 bp, Zea mays
atgtcgtcgttctggggtgtggaagtgaagcccgggaagccctacactctcacccatggcgacttcgccggccgcctgcgcctcacccaggcgacgctaggggttgaggtcggcaagggggagaaggctaccggcgtgaagaggtgtgtgctacagtgcagtgccgagaacagagatcccgtttttctttgcgtcctcatgccggagcagtcggagacatgccacctggagctagaatttgaggaggaagtcaccttctcagtgattgggccaaggagcatccacctcgctggatactacatgactgatgtgtgtggggaagataggggtgacagtgattctgggagcgattcacttcaaagttcagatgaggatggtttcttggaggaggacgatgatggtaacatggttatgggatattcagacagtgaagatgatgattcagagtctgatgatgaagagatggcatacaatcagggtaggggcaaaagttcagttgttattgaggaaattgaagaggatgacaaggctgctgttgctgaagtgcagaagggattgaagaagcaaagccgtgaaaatggtgatgagtctcaactccagcttgctgcaagaaatccacctactgaatccttggaaagtgaagatgaagatggttttcctgtatcattttctgaatcaaagaagagttctgagattgtttcaaacaagaatgggggaaaagacaaggagactagcaacaaagacctgaaaagaaaaagtggagccattagcgaccgtggtgattcttcagggggggtaaaagctgagattgatggggcatcaaagaaaaagaaaaagggcaaggacaaaagcactgttatggacacaggaaaagtaaacaacgaagaaaaggaggttaagctacacgattctccagctgatcctgtcagtacaaaacagaagaaaaagaaaaacaagaacaaaagtgcttctgagggtgataccagtgagcaatctgctaagaacaacaatattgataaagacaatgaggaggcaagtgcgcaggaggccaataaaaagatcaagaaaaagaaggcacatgatataagcagaagtgaaagtcaggcaggaactggacttggtgagtcagatagcaaggaaccactccaaacacgaacgtttgccaatggtatgatgattcaggaggtagagatgggcaaacctgatggtaaaaaggccagccgtgggaagaaggtttctgttagatatattggcaagctaaagaatggcactattttcgactccaacgtcagtggaagaccttttgagtttagactaggtgttgggcaggttatcagtggctgggacgttggcgtcaatggtatgcgggttggggacaaaaggagactcaccattccaccttccatggggtatgggagcaaaagagtggggcagataccacagaactcaactctcatcttcgatgtggagctggtgaacgtaaaatga

SEQ ID NO: 186 - protein, 495 aa, Zea mays
MSSFWGVEVKPGKPYTLTHGDFAGRLRLTQATLGVEVGKGEKATGVKRCVLQCSAENRDPVFLCVLMPEQSETCHLELEFEEEVTFSVIGPRSIHLAGYYMTDVCGEDRGDSDSGSDSLQSSDEDGFLEEDDDGNMVMGYSDSEDDDSESDDEEMAYNQGRGKSSVVIEEIEEDDKAAVAEVQKGLKKQSRENGDESQLQLAARNPPTESLESEDEDGFPVSFSESKKSSEIVSNKNGGKDKETSNKDLKRKSGAISDRGDSSGGVKAEIDGASKKKKKGKDKSTVMDTGKVNNEEKEVKLHDSPADPVSTKQKKKKNKNKSASEGDTSEQSAKNNNIDKDNEEASAQEANKKIKKKKAHDISRSESQAGTGLGESDSKEPLQTRTFANGMMIQEVEMGKPDGKKASRGKKVSVRYIGKLKNGTIFDSNVSGRPFEFRLGVGQVISGWDVGVNGMRVGDKRRLTIPPSMGYGSKRVGQIPQNSTLIFDVELVNVK

SEQ ID NO: 187 - DNA, 606 bp, Zea mays
atggctgcagcagcgtgctcctctgcctcgccgctcctcctcccctcagggccgagacatgcgtcggcctccagggcgtggtttctcggcggcaggagcagggcgctgagatcagaggcgccgtgctgctgcaaggccgccgccgcccgtggaagcgctccgcaatgcgggacggtcggtggtggcagcagcagcacccggagggggctgctaggcgtggccctgggagcctctgccttggggctggccgcgtttgacgccgtcgccgccgggttgccgccggaggagaagcccaagctctgcgacgccgcctgcgaaggcgagctcgaaaatgtgcctatggtaactacagaatccggactgcagtacaaggatatcaaagtgggcgaagggcctagcccacccgttggtttccaggttgcagcaaattatgttgctatggtgccaactgggcagatattcgacagttcgctggagaaaggtcagccctacatattccgtgttggatcagggcaggtgatcaaggggcttgatgagggaattttgtcgatgaaggttggaggactacgtcggctgtacatacctgggccattagcgttcccctaa

SEQ ID NO: 188 - protein, 201 aa, Zea mays
MAAAACSSASPLLLPSGPRHASASRAWFLGGRSRALRSEAPCCCKAAAARGSAPQCGTVGGGSSSTRRGLLGVALGASALGLAAFDAVAAGLPPEEKPKLCDAACEGELENVPMVTTESGLQYKDIKVGEGPSPPVGFQVAANYVAMVPTGQIFDSSLEKGQPYIFRVGSGQVIKGLDEGILSMKVGGLRRLYIPGPLAFP

SEQ ID NO: 189 - DNA, 468 bp, Zea mays
atggggaagaagcggcagcttatctgcctcgcagccgccgtcgccgccgcggccatcctcctgacagcgtcggccaagaagtccagcgacgtcaccgagcttcagatcggcgtcaagtacaaaccggagtcatgtaccctgcaagcacacaaaggagacaagattaaggttcattatcgtggggcactcactgacggatcagtttttgattctggctatgacagaggtgacccgtttgaatttactcttggaaacggccaagtgataaaaggctgggaccaaggattgctaggtatgtgcgtcggtgaaaagcggaagctaaagatacctgcaaagatgggctatggcgagcgaggctccccaccgaagattccaggcggagcgactctggtattcgacacggagcttatcgccgtcaacgggaagacatctggcggtgcgaatccagaaactgaaagtgagctctga

SEQ ID NO: 190 - protein, 155 aa, Zea mays
MGKKRQLICLAAAVAAAAILLTASAKKSSDVTELQIGVKYKPESCTLQAHKGDKIKVHYRGALTDGSVFDSGYDRGDPFEFTLGNGQVIKGWDQGLLGMCVGEKRKLKIPAKMGYGERGSPPKIPGGATLVFDTELIAVNGKTSGGANPETESEL

SEQ ID NO: 191 - DNA, 546 bp, Zea mays
atggcgccacccatcacgtccctgtcgtctctgatggcgtccagcccaatcccgacgccgccgccgccgctcccgaagaccagcggcagagcgctctccgtcgcgccctgcggctccgcgtcgtcctcgtcgccgtccacttcctcgactcctcatccggtggcggcgtcggcgtcggcgggcaggagggggctgctggcgctgggcgccgggttcctggcctcggccgcgctgctgtccccggcgggcgacgccggcgccacgcgcatcgagtactacgcgacggtcggggacaagatgtgcgacctgagcctcgtcaagtccggcctcgcgtactgcgacgtcgaggtcggcaccggcgtccagcccccgcgcggcgagctcatcaatgtgcactacaccgcgagatttcccgacggtacgctgttcgacagcagctacaagcgcgggaggccactgacgatgcgcataggcgcaggcaaggtgtgcatgtataagcatccattgtcgctcactgaaaacgacgttcagttttcatgccagtaa

SEQ ID NO: 192 - protein, 181 aa, Zea mays
MAPPITSLSSLMASSPIPTPPPPLPKTSGRALSVAPCGSASSSSPSTSSTPHPVAASASAGRRGLLALGAGFLASAALLSPAGDAGATRIEYYATVGDKMCDLSLVKSGLAYCDVEVGTGVQPPRGELINVHYTARFPDGTLFDSSYKRGRPLTMRIGAGKVCMYKHPLSLTENDVQFSCQ

SEQ ID NO: 193 - DNA, 681 bp, Zea mays
atggcgccacccatcacgtccctgtcgtctctgatggcgtccagcccaatcccgacgccgccgccgccgctcccgaagaccagcggcagagcgctctccgtcgcgccctgcggctccgcgtcgtcctcgtcgccgtccacttcctcgactcctcatccggtggcggcgtcggcgtcggcgggcaggagggggctgctggcgctgggcgccgggttcctggcctcggccgcgctgctgtccccggcgggcgacgccggcgccacgcgcatcgagtactacgcgacggtcggggacaagatgtgcgacctgagcctcgtcaagtccggcctcgcgtactgcgacgtcgaggtcggcaccggcgtccagcccccgcgcggcgagctcatcaatgtgcactacaccgcgagatttcccgacggtacgctgttcgacagcagctacaagcgcgggaggccactgacgatgcgcataggcgcaggcaagatcctccgagggcttgaacaggggatcagtggcggcggcggtgtgccgcccatgcttgttggtggaaagcgcaagctgatgatacctgcgtcactggcgtacgggcctgaaccggcaggctgcttctcaggagactgcaacatccccggaaactccacacttctatatgaccttttcctcgtcgggatctacaagtga

SEQ ID NO: 194 - protein, 226 aa, Zea mays
MAPPITSLSSLMASSPIPTPPPPLPKTSGRALSVAPCGSASSSSPSTSSTPHPVAASASAGRRGLLALGAGFLASAALLSPAGDAGATRIEYYATVGDKMCDLSLVKSGLAYCDVEVGTGVQPPRGELINVHYTARFPDGTLFDSSYKRGRPLTMRIGAGKILRGLEQGISGGGGVPPMLVGGKRKLMIPASLAYGPEPAGCFSGDCNIPGNSTLLYDLFLVGIYK

SEQ ID NO: 195 - DNA, 450 bp, Zea mays
atggcgccacccatcacgtccctgtcgtctctgatggcgtccagcccaatcccgacgccgccgccgccgctcccgaagaccagcggcagagcgctctccgtcgcgccctgcggctccgcgtcgtcctcgtcgccgtccacttcctcgactcctcatccggtggcggcgtcggcgtcggcgggcaggagggggctgctggcgctgggcgccgggttcctggcctcggccgcgctgctgtccccggcgggcgacgccggcgccacgcgcatcgagtactacgcgacggtcggggacaagatgtgcgacctgagcctcgtcaagtccggcctcgcgtactgcgacgtcgaggtcggcaccggcgtccagcccccgcgcggcgagctcatcaatgtcagtaccgagaccaccgtctcttctttcctgcatgccttgcgccttcctctgacttaa

SEQ ID NO: 196 - protein, 149 aa, Zea mays
MAPPITSLSSLMASSPIPTPPPPLPKTSGRALSVAPCGSASSSSPSTSSTPHPVAASASAGRRGLLALGAGFLASAALLSPAGDAGATRIEYYATVGDKMCDLSLVKSGLAYCDVEVGTGVQPPRGELINVSTETTVSSFLHALRLPLT

SEQ ID NO: 197 - DNA, 561 bp, Zea mays
atggaagagatgatagatctaacgggggatggaggtgttcttaagacagtagtgcggaaagcaaaagatgatgctatagcgccatccgagagcctgcccttggttgatgttcattacgaaggtacacttgctgagactggtgaagttttcgataccacccatgaagataactctattttctcatttgaaattggacaaggcgctgtcatcaaagcatgggatatagccttaagaactatgaaggttggcgaggttgcaaaaattacatgcaaatcagaatatgcatatggagctgcaggctcaccaccagagatacctcctaatgcaacccttatttttgaggtggagctagtagcttgcaggccgaggaaaggttcaagcttaggtagtgtatctgatgagaaagccagacttgaagaacttaagaagcaacgggagctagctgctgctaccaaagaagaggagaaaaagaagagggaggaagcgaaggccgcggcagcagcccgggtgcaagcaaagcttgatgccaagaaggggaaggggaagggaaagggaaaatag

SEQ ID NO: 198 - protein, 186 aa, Zea mays
MEEMIDLTGDGGVLKTVVRKAKDDAIAPSESLPLVDVHYEGTLAETGEVFDTTHEDNSIFSFEIGQGAVIKAWDIALRTMKVGEVAKITCKSEYAYGAAGSPPEIPPNATLIFEVELVACRPRKGSSLGSVSDEKARLEELKKQRELAAATKEEEKKKREEAKAAAAARVQAKLDAKKGKGKGKGK

SEQ ID NO: 199 - DNA, 420 bp, Zea mays
atggtcacgactgccgtcgcggcggtcgccggcgccgtgccgccagctcggaaagcccaagcggtaactgtggccacaaccacagcactacctcccaccctcactagaaggcagctcctcgccgcggtcgccaccgcctccaccctccccacggccgccgcctcagctgcggcccccaggttcgccgagattccgggctccggcggcgtgaaggccctggacctccgggaaggttcgggagagatcccggccgttggcgaccaggttgcggttcattattatgggagattagcagcgaagcaaggatggcgcttcgattcgacgtatgatcacaaggacgagaccggcgatcccatgccgtttgtcttcacccttggatccggcaagcacccagcaaaagcaaattttatgggacgctag

SEQ ID NO: 200 - protein, 139 aa, Zea mays
MVTTAVAAVAGAVPPARKAQAVTVATTTALPPTLTRRQLLAAVATASTLPTAAASAAAPRFAEIPGSGGVKALDLREGSGEIPAVGDQVAVHYYGRLAAKQGWRFDSTYDHKDETGDPMPFVFTLGSGKHPAKANFMGR

SEQ ID NO: 201 - DNA, 762 bp, Zea mays
atggccacgttcctgggaagctcaccggcgctcctcgctcgtcccattgccaagccgcacatctcctgcgcgcagacaccgcgcccggcaattgcccagaaccagccgccgtccagcgagcagccggaaccacagaaacagcggcactccgtgcaagcgcagccacagcaggcggcggcggcggcgaggccgaagcacgcgggcgtcgcggactccactgactggatagcctcgtcgttgacgcggcggtccggaatcggtgcggggctggcgtgggccggcttcctggccgtcggcgtcgtgtcggagcagctcaagacacgcttcgaggtcgcgcagcagcaggccaacaccaaggacgtggagcaggagcacgaggtcgtgttgcccaacgggatccggtactacgagatgcgcgtcggtggcggcgacgtcccgcggccgggcgacctggtggtaaccgacctgcagggccgggtggccggcagcggcggggaggcgttcgtggacacgctcggcgacggcaagcggccgctggcgctggtgatgggctcccggccgtacaccaggggcatgtgcgagggtgttgagcacgtggtgcgctccatgaggccaggcggcaagcggcgggtggtcgtcccgccgggcctcgcgttcggcgacggcggcgccgacttcggggaggagcacgtccagatcccgcccggcgcgacgctcgagtacgtcgtgcaggtcgacaaggtgtccatcgcgccggcgtga

SEQ ID NO: 202 - protein, 253 aa, Zea mays
MATFLGSSPALLARPIAKPHISCAQTPRPAIAQNQPPSSEQPEPQKQRHSVQAQPQQAAAAARPKHAGVADSTDWIASSLTRRSGIGAGLAWAGFLAVGVVSEQLKTRFEVAQQQANTKDVEQEHEVVLPNGIRYYEMRVGGGDVPRPGDLVVTDLQGRVAGSGGEAFVDTLGDGKRPLALVMGSRPYTRGMCEGVEHVVRSMRPGGKRRVVVPPGLAFGDGGADFGEEHVQIPPGATLEYVVQVDKVSIAPA

SEQ ID NO: 203 - DNA, 762 bp, Zea mays
atggccacgttcctgggaagctcaccggcgctcctcgcccgtcccatcgccaagccccacatctcctgcgcgcagacaccgcggccgccaagcgcccagaaccagccgccgtccagcgagcaaccgcaagcacaaacacagcagcagtccgtgcaagcgcagccacagcaggcgacggcgaggccgaagcgcgcgggcggcgcggactccacggactgggtggcctcgtcgctgacgcggcggttcgggatcggcgcggggctggcgtgggccggctttctggccgtcggcgtcgtgtccgagcagctcaagacccgcttcgaggtcgcgcagcagcaggccaacaccaaggacgtggaacaggagcaggaggtcgtcctgcccaacggggtccggtactacgagatgcgcgtcggcggcggcgacgtcccgcggccgggcgacctggtggtgatcgacctgcagggccgggtggccggcagtggcggcggcggggaggcgttcgtggacacgttcgtcgacggcaagcggccgctggcgctggtgatgggctcccggccgtacaccaggggcatgtgcgagggcgtcgagtacgcgctgcgctccatgagggccggcggcaagcggcgggtggtcgtcccgccgggcctcgggttcggcgacgacggcgccgacttcggggaggagcacgtccaggtcccgcccggcgcgacgctcgagtacatcgtgcaggtcgacagggtgtccatcgcgccggcgtga

SEQ ID NO: 204 - protein, 253 aa, Zea mays
MATFLGSSPALLARPIAKPHISCAQTPRPPSAQNQPPSSEQPQAQTQQQSVQAQPQQATARPKRAGGADSTDWVASSLTRRFGIGAGLAWAGFLAVGVVSEQLKTRFEVAQQQANTKDVEQEQEVVLPNGVRYYEMRVGGGDVPRPGDLVVIDLQGRVAGSGGGGEAFVDTFVDGKRPLALVMGSRPYTRGMCEGVEYALRSMRAGGKRRVVVPPGLGFGDDGADFGEEHVQVPPGATLEYIVQVDRVSIAPA

SEQ ID NO: 205 - DNA, 642 bp, Zea mays
atgggtccgggcgcgtccacctccgcgcagccgctgtcccggctcctcctcagcctcccgaagccaggcgccgcgaagcacccccgctcctcctcctcctcctcctctccttcgcagcctcgcccggacgtcgccgcggccaggagccccggcctcgtcctccggcggcgcgaggcagcggccgccctgctgtcgaccgcctttctctcccgcttcgccctccccgcggccgccgcggacggcggggagtgcccgctggaggtggcgccgtccgggctcgccttctgcgaccgcgtcgtcggcaccggcgccgccgcccaggagggacagctcatcagggcgcattacacggggaggctggaggacggcacggtgttcgacagcagctacaagcgcgggaagccgctcaccttccgcgttggcgtcggagaggtgatcaaaggatgggatcagggtattgttggcggcgaagggatcccgccgatgctcgctgggggtaagcggacgctgaagctgccaccggcgctggcctacggcgagaagggtgctgggtgcagagggtgggagcccacctcgtgcgtcatcccgccgaactccacgctcctcttcgacgtcgagtacgtcggcagagccaccggctga

SEQ ID NO: 206 - protein, 213 aa, Zea mays
MGPGASTSAQPLSRLLLSLPKPGAAKHPRSSSSSSSPSQPRPDVAAARSPGLVLRRREAAAALLSTAFLSRFALPAAAADGGECPLEVAPSGLAFCDRVVGTGAAAQEGQLIRAHYTGRLEDGTVFDSSYKRGKPLTFRVGVGEVIKGWDQGIVGGEGIPPMLAGGKRTLKLPPALAYGEKGAGCRGWEPTSCVIPPNSTLLFDVEYVGRATG

SEQ ID NO: 207 - DNA, 1662 bp, Zea mays
atggacgaggacttcgagatgcctcccgccggcgccgatgagatgatgggcgacgacgagatgggcgacttcggcggcgacgagggcccggtgatgaaggtgggcgaggagaaggaggtcggcaaggaggggctcaagaagaagctgctcaaggagggcgagggctgggagactcccgaggtcggcgacgaggttgaagtgcattacacgggcacgctccttgatgggacaaaattcgactcaagccgtgatcgtggagaacccttcaagttcaagcttggacaaggtcaagtgataaagggttgggatcaaggaatcaagaccatgaagaaaggagaaaatgctatttttaccattcctccagagctggcttatggagcatctggttcacctccaactatcccacccaatgcaaccctgcagtttgatgttgagctgctttcatggaccagtgtcaaagacatttgcaaagatggcggcatattcaagaagatccttaaagagggagagaaatgggagaacccaaaggatcctgatgaagtacttgtgaaatatgaggcccgtctggaagatggtactgttgtatccaagtctgagggggttgagtttactgtgaaagatggctacttttgtcctgccctggccaaagctgtcaaaaccatgaaaaaggcagagaaggtgctccttacagtaaagccacaatatggatttggtgagaagggtagaccagcagctggagaggaaggtgctgtgccgccaaatgcttcgctgctcattgaccttgagttgatttcatggaagactgtcacagaaattggggatgataagaaaatccttaagaaggttctcaaggagggagaaggttatgagcgtcccaacgagggtgctgttgttgaagtcaaaattatcggaaagcttcaggatggcgcggtgtttacaaagaaggggcatgacgaagagccatttaaattcaagaccgatgaagaggaagttattgccggtcttgatcgtgctgtgttgaacatgaagaagggcgaggttgctcttgtcacaattcctcctgaatatgcatttggttcaactgagtcaaagcaggatcttgctgttgttccacctaacagcacagtaatatatgaagttgagcttatttcatttgtgaaggacaaggagtcgtgggacttgaacaatgaagagaagattgaggctgctggtaagaagaaagaggaagggaatgcattgttcaaatcgggcaaatatgctagagcttccaagcgatatgagaaggctgccaagtacattgagtacgacacttcgttcagtgaagatgagaagaagcaatccaagcaactgaagatcagctgcaacctaaacaatgctgcctgcaaactgaagttgaaggattacaaggaagctgcgaagctttgcaccaaggttctggaactagacagccaaaatgtcaaggctctctacaggagggtgcaagcttacattcaacttgctgacctagagctagcagaggccgatatcaaaaaggcactggaaatcgatcctgacaacagggatgtcaagttggaatataagatcctgaaggagaagatcaaggagtacaacaagaaggacgccaaattctacagcaacatgttcgccaagatgacaaagtaa

SEQ ID NO: 208 - protein, 553 aa, Zea mays
MDEDFEMPPAGADEMMGDDEMGDFGGDEGPVMKVGEEKEVGKEGLKKKLLKEGEGWETPEVGDEVEVHYTGTLLDGTKFDSSRDRGEPFKFKLGQGQVIKGWDQGIKTMKKGENAIFTIPPELAYGASGSPPTIPPNATLQFDVELLSWTSVKDICKDGGIFKKILKEGEKWENPKDPDEVLVKYEARLEDGTVVSKSEGVEFTVKDGYFCPALAKAVKTMKKAEKVLLTVKPQYGFGEKGRPAAGEEGAVPPNASLLIDLELISWKTVTEIGDDKKILKKVLKEGEGYERPNEGAVVEVKIIGKLQDGAVFTKKGHDEEPFKFKTDEEEVIAGLDRAVLNMKKGEVALVTIPPEYAFGSTESKQDLAVVPPNSTVIYEVELISFVKDKESWDLNNEEKIEAAGKKKEEGNALFKSGKYARASKRYEKAAKYIEYDTSFSEDEKKQSKQLKISCNLNNAACKLKLKDYKEAAKLCTKVLELDSQNVKALYRRVQAYIQLADLELAEADIKKALEIDPDNRDVKLEYKILKEKIKEYNKKDAKFYSNMFAKMTK

SEQ ID NO: 209 - DNA, 1662 bp, Zea mays
atggacgaggacttcgagatgcctcccgccggcgccgatgagatgatgggcgacgacgagatgggcgacttcggcggcgacgagggcccggtgatgaaggtgggcgaggagaaggaggtcggcaaggaggggctcaagaagaagctgctcaaggagggcgagggctgggagactcccgaggtcggcgacgaggttgaagtgcattacacgggcacgctccttgatgggacaaaattcgactcaagccgtgatcgtggagaacccttcaagttcaagcttggacaaggtcaagtgataaagggttgggatcaaggaatcaagaccatgaagaaaggagaaaatgctatttttaccattcctccagagctggcttatggagcatctggttcacctccaactatcccacccaatgcaaccctgcagtttgatgttgagctgctttcatggaccagtgtcaaagacatttgcaaagatggcggcatattcaagaagatccttaaagagggagagaaatgggagaacccaaaggatcctgatgaagtacttgtgaaatatgaggcccgtctggaagatggtactgttgtatccaagtctgagggggttgagtttactgtgaaagatggctacttttgtcctgccctggccaaagctgtcaaaaccatgaaaaaggcagagaaggtgctccttacagtaaagccacaatatggatttggtgagaagggtagaccagcagctggagaggaaggtgctgtgccgccaaatgcttcgctgctcattgaccttgagttgatttcatggaagactgtcacagaaattggggatgataagaaaatccttaagaaggttctcaaggagggagaaggttatgagcgtcccaacgagggtgctgttgttgaagtcaaaattatcggaaagcttcaggatggcgcggtgtttacaaagaaggggcatgacgaagagccatttaaattcaagaccgatgaagaggaagttattgccggtcttgatcgtgctgtgttgaacatgaagaagggcgaggttgctcttgtcacaattcctcctgaatatgcatttggttcaactgagtcaaagcaggatcttgctgttgttccacctaacagcacagtaatatatgaagttgagcttatttcatttgtgaaggacaaggagtcgtgggacttgaacaatgaagagaagattgaggctgctggtaagaagaaagaggaagggaatgcattgttcaaatcgggcaaatatgctagagcttccaagcgatatgagaaggctgccaagtacattgagtacgacacttcgttcagtgaagatgagaagaagcaatccaagcaactgaagatcagctgcaacctaaacaatgctgcctgcaaactgaagttgaaggattacaaggaagctgcgaagctttgcaccaaggttctggaactagacagccaaaatgtcaaggctctctacaggagggtgcaagcttacattcaacttgctgacctagagctagcagaggccgatatcaaaaaggcactggaaatcgatcctgacaacagggatgtcaagttggaatataagatcctgaaggagaagatcaaggagtacaacaagaaggacgccaaattctacagcaacatgttcgccaagatgacaaagtag

SEQ ID NO: 210 - protein, 553 aa, Zea mays; identical to SEQ ID NO: 208

SEQ ID NO: 211 - DNA, 1479 bp, Zea mays
atggacgaggacttcgagatgcctcccgccggcgccgatgagatgatgggcgacgacgagatgggcgacttcggcggcgacgagggcccggtgatgaaggtgggcgaggagaaggaggtcggcaaggaggggctcaagaagaagctgctcaaggagggcgagggctgggagactcccgaggtcggcgacgaggttgaagtgcattacacgggcacgctccttgatgggacaaaattcgactcaagccgtgatcgtggagaacccttcaagttcaagcttggacaaggtcaagtgataaagggttgggatcaaggaatcaagaccatgaagaaaggagaaaatgctatttttaccattcctccagagctggcttatggagcatctggttcacctccaactatcccacccaatgcaaccctgcagtttgatgttgagctgctttcatggaccagtgtcaaagacatttgcaaagatggcggcatattcaagaagatccttaaagagggagagaaatgggagaacccaaaggatcctgatgaagtacttgtgaaatatgaggcccgtctggaagatggtactgttgtatccaagtctgagggggttgagtttactgtgaaagatggctacttttgtcctgccctggccaaagctgtcaaaaccatgaaaaaggcagagaaggtgctccttacagtaaagccacaatgtgagattccatttcaaaatggatttggtgagaagggtagaccagcagctggagaggaaggtgctgtgccgccaaatgcttcgctgctcattgaccttgagttgatttcatggaagactgtcacagaaattggggatgataagaaaatccttaagaaggttctcaaggagggagaaggttatgagcgtcccaacgagggtgctgttgttgaagtcaaaattatcggaaagcttcaggatggcgcggtgtttacaaagaaggggcatgacgaagagccatttaaattcaagaccgatgaagaggaagttattgccggtcttgatcgtgctgtgttgaacatgaagaagggcgaggttgctcttgtcacaattcctcctgaatatgcatttggttcaactgagtcaaagcaggatcttgctgttgttccacctaacagcacagtaatatatgaagttgagcttatttcatttgtgaaggacaaggagtcgtgggacttgaacaatgaagagaagattgaggctgctggtaagaagaaagaggaagggaatgcattgttcaaatcgggcaaatatgctagagcttccaagcgatatgagaaggctgccaagtacattgagtacgacacttcgttcagtgaagatgagaagaagcaatccaagcaactgaagatcagctgcaacctaaacaatgctgcctgcaaactgaagttgaaggattacaaggaagctgcgaagctttgcaccaaggtacaatctattcctgcaatgcgggcgtga

SEQ ID NO: 212 - protein, 492 aa, Zea mays
MDEDFEMPPAGADEMMGDDEMGDFGGDEGPVMKVGEEKEVGKEGLKKKLLKEGEGWETPEVGDEVEVHYTGTLLDGTKFDSSRDRGEPFKFKLGQGQVIKGWDQGIKTMKKGENAIFTIPPELAYGASGSPPTIPPNATLQFDVELLSWTSVKDICKDGGIFKKILKEGEKWENPKDPDEVLVKYEARLEDGTVVSKSEGVEFTVKDGYFCPALAKAVKTMKKAEKVLLTVKPQCEIPFQNGFGEKGRPAAGEEGAVPPNASLLIDLELISWKTVTEIGDDKKILKKVLKEGEGYERPNEGAVVEVKIIGKLQDGAVFTKKGHDEEPFKFKTDEEEVIAGLDRAVLNMKKGEVALVTIPPEYAFGSTESKQDLAVVPPNSTVIYEVELISFVKDKESWDLNNEEKIEAAGKKKEEGNALFKSGKYARASKRYEKAAKYIEYDTSFSEDEKKQSKQLKISCNLNNAACKLKLKDYKEAAKLCTKVQSIPAMRA

SEQ ID NO: 213 - DNA, 1680 bp, Zea mays
atggacgaggacttcgagatgcctcccgccggcgccgatgagatgatgggcgacgacgagatgggcgacttcggcggcgacgagggcccggtgatgaaggtgggcgaggagaaggaggtcggcaaggaggggctcaagaagaagctgctcaaggagggcgagggctgggagactcccgaggtcggcgacgaggttgaagtgcattacacgggcacgctccttgatgggacaaaattcgactcaagccgtgatcgtggagaacccttcaagttcaagcttggacaaggtcaagtgataaagggttgggatcaaggaatcaagaccatgaagaaaggagaaaatgctatttttaccattcctccagagctggcttatggagcatctggttcacctccaactatcccacccaatgcaaccctgcagtttgatgttgagctgctttcatggaccagtgtcaaagacatttgcaaagatggcggcatattcaagaagatccttaaagagggagagaaatgggagaacccaaaggatcctgatgaagtacttgtgaaatatgaggcccgtctggaagatggtactgttgtatccaagtctgagggggttgagtttactgtgaaagatggctacttttgtcctgccctggccaaagctgtcaaaaccatgaaaaaggcagagaaggtgctccttacagtaaagccacaatgtgagattccatttcaaaatggatttggtgagaagggtagaccagcagctggagaggaaggtgctgtgccgccaaatgcttcgctgctcattgaccttgagttgatttcatggaagactgtcacagaaattggggatgataagaaaatccttaagaaggttctcaaggagggagaaggttatgagcgtcccaacgagggtgctgttgttgaagtcaaaattatcggaaagcttcaggatggcgcggtgtttacaaagaaggggcatgacgaagagccatttaaattcaagaccgatgaagaggaagttattgccggtcttgatcgtgctgtgttgaacatgaagaagggcgaggttgctcttgtcacaattcctcctgaatatgcatttggttcaactgagtcaaagcaggatcttgctgttgttccacctaacagcacagtaatatatgaagttgagcttatttcatttgtgaaggacaaggagtcgtgggacttgaacaatgaagagaagattgaggctgctggtaagaagaaagaggaagggaatgcattgttcaaatcgggcaaatatgctagagcttccaagcgatatgagaaggctgccaagtacattgagtacgacacttcgttcagtgaagatgagaagaagcaatccaagcaactgaagatcagctgcaacctaaacaatgctgcctgcaaactgaagttgaaggattacaaggaagctgcgaagctttgcaccaaggttctggaactagacagccaaaatgtcaaggctctctacaggagggtgcaagcttacattcaacttgctgacctagagctagcagaggccgatatcaaaaaggcactggaaatcgatcctgacaacagggatgtcaagttggaatataagatcctgaaggagaagatcaaggagtacaacaagaaggacgccaaattctacagcaacatgttcgccaagatgacaaagtag

SEQ ID NO: 214 - protein, 559 aa, Zea mays
MDEDFEMPPAGADEMMGDDEMGDFGGDEGPVMKVGEEKEVGKEGLKKKLLKEGEGWETPEVGDEVEVHYTGTLLDGTKFDSSRDRGEPFKFKLGQGQVIKGWDQGIKTMKKGENAIFTIPPELAYGASGSPPTIPPNATLQFDVELLSWTSVKDICKDGGIFKKILKEGEKWENPKDPDEVLVKYEARLEDGTVVSKSEGVEFTVKDGYFCPALAKAVKTMKKAEKVLLTVKPQCEIPFQNGFGEKGRPAAGEEGAVPPNASLLIDLELISWKTVTEIGDDKKILKKVLKEGEGYERPNEGAVVEVKIIGKLQDGAVFTKKGHDEEPFKFKTDEEEVIAGLDRAVLNMKKGEVALVTIPPEYAFGSTESKQDLAVVPPNSTVIYEVELISFVKDKESWDLNNEEKIEAAGKKKEEGNALFKSGKYARASKRYEKAAKYIEYDTSFSEDEKKQSKQLKISCNLNNAACKLKLKDYKEAAKLCTKVLELDSQNVKALYRRVQAYIQLADLELAEADIKKALEIDPDNRDVKLEYKILKEKIKEYNKKDAKFYSNMFAKMTK

SEQ ID NO: 215 - DNA, 741 bp, Zea mays
atgaaacctgttgtcaagcgcaatgctcctaaaagatttgatagcgttgatgatgaccctccagtcaagaagcctgttgtcacgtgcagtgctcctttaatagttgatagcggcagtgatgaaaatgataatgtacctatatctgttacattgggtaagaaagacgatgctaaggttgctgaggaaactgaccctccaaatcaggcaaatgacgtcaccgaaaaaaagattattgatgtcaagaaaagaaaacattctgtcatcagtgaggatcctgcattatcaatggatatagcagatgctaatgtgccatctgttccaaaacaaggtgctgaaataaaaaagaaatcaaagaaaaatatgaaaaaacaatcgggggaaaaggatgagaagcagtccaatgtaagaacattgcaagatgggttgatggtagaagatctgtcaataggaaacattgatgcaaaagtggcttctgatagctgcaaggtctacatcaaatatgttggcatgttgaaggatgggaaaattattgagtctaatgtcagtgaaaagccttacaagttcaagcttggtgctggaaaagttattcgtggatgggatgttggtattcgtggtatgcgtgttggggagaaaagaaagcttacagtgccaccttcaatgctctctggcgggaaatcagtgggagaagtacctgcaaattcttcagtcatatatgaaatcgagttagtgaaggtgaaatag

SEQ ID NO: 216 - protein, 246 aa, Zea mays
MKPVVKRNAPKRFDSVDDDPPVKKPVVTCSAPLIVDSGSDENDNVPISVTLGKKDDAKVAEETDPPNQANDVTEKKIIDVKKRKHSVISEDPALSMDIADANVPSVPKQGAEIKKKSKKNMKKQSGEKDEKQSNVRTLQDGLMVEDLSIGNIDAKVASDSCKVYIKYVGMLKDGKIIESNVSEKPYKFKLGAGKVIRGWDVGIRGMRVGEKRKLTVPPSMLSGGKSVGEVPANSSVIYEIELVKVK

SEQ ID NO: 217 - DNA, 447 bp, Zea mays
atggcgaagccgcagcttcttctctgtttcctactcgccgcctccgcgccgctaatcgtcgccacggccaagaaatccggggacgtgtcggagctccagatcggcgtcaagtacaagccggaatcatgcagcattcaagctcacaaaggtgacaaggttaaagttcactaccgtggaaaacttactgatggaacggtttttgattcaagctatgaaagaggtgacccgattgaatttgaattgggcactggacaagtgatcaaaggatgggatcagggtctcctgggaatgtgcgttggtgaaaagcggaagttgaagatcccatcaaagcttggctatgggcctcaaggctcgccacctactattcctggtggagcaaccctcatatttgacacggagcttgtcgctgtcaatggagaaccaaccaaccaatctgacgagctttag

SEQ ID NO: 218 - protein, 148 aa, Zea mays
MAKPQLLLCFLLAASAPLIVATAKKSGDVSELQIGVKYKPESCSIQAHKGDKVKVHYRGKLTDGTVFDSSYERGDPIEFELGTGQVIKGWDQGLLGMCVGEKRKLKIPSKLGYGPQGSPPTIPGGATLIFDTELVAVNGEPTNQSDEL

SEQ ID NO: 219 - DNA, 429 bp, Zea mays
atggcgaagccgcagcttcttctctgtttcctactcgccgcctccgcgccgctaatcgtcgccacggccaagaaatccggggacgtgtcggagctccagatcggcgtcaagtacaagccggaatcatgcagcattcaagctcacaaaggtgacaagggaaaacttactgatggaacggtttttgattcaagctatgaaagaggtgacccgattgaatttgaattgggcactggacaagtgatcaaaggatgggatcagggtctcctgggaatgtgcgttggtgaaaagcggaagttgaagatcccatcaaagcttggctatgggcctcaaggctcgccacctactattcctggtggagcaaccctcatatttgacacggagcttgtcgctgtcaatggagaaccaaccaaccaatctgacgagctttag

SEQ ID NO: 220 - protein, 142 aa, Zea mays
MAKPQLLLCFLLAASAPLIVATAKKSGDVSELQIGVKYKPESCSIQAHKGDKGKLTDGTVFDSSYERGDPIEFELGTGQVIKGWDQGLLGMCVGEKRKLKIPSKLGYGPQGSPPTIPGGATLIFDTELVAVNGEPTNQSDEL

SEQ ID NO: 221 - DNA, 1896 bp, Zea mays
atggcccaagatgccggcgacggcggtggggaactcccgccgcccgtaaagaagaagtcaccggcggaggaggaggccgagaagaggaggaagaagcttacacctgggagcttaatgaagggcattatacggtctgggagcggtgatgccacccctgcagagggcgatcaggttatacttcattgcactactcggacaattgatggtatcgttgtaaattctacaagaagggagcatggaggtaaaggaatcccactcagatttgttttagggaagagcaagatgatcctaggctttgctgaaggcttcccaacaatgctgaagggtgaaattgctatgttcaaaatgcagcctaaaattcactacgctgaggacgattgtccagttgcaactccagatggctttccgaaggatgatgaacttcaatttgagattgaaatgttggatttctttaaagccaaggttgtggcagatgatttaggggttgtaaagaagatagttgaagaagggaagggatgggaaacacctagagagccatatgaaataacagcacggataactgcaagaacagcagatggaaaagaaattattccgagtaaagaagaggcatatttcttcactattggtaaatctgaggtacctaaagggcttgagatgggcatcggaacaatgtcacacaaggaaaaggcaattatttttgtcagtagtacttatttgacgaagtcctcactaatgccacagcttgaaggccttgaagaagttcatttttacattgaactggttcagtttatccaggtgagagacatgcttggtgatggtcgactaataaaacgacgtgtatttgatggaaaaggtgaatttccaatggactgccctcttcatgatagcctattaagagtgcattataagggcatgctccttgatgaaccaaagtcagttttttatgatacacgtgccgataatgatggtgaaccgttggaattctgttctggagaaggcttggtaccagagggttttgaaatgtgtgttcggctaatgcttcctggtgaaaaatctattgtcacctgcccaccagattttgcatatgataagttcccaaggccagcaaatgttcctgaaggagctcatgttcagtgggaaattgaactacttggattcgaaatgcccaaggattggactggcttaacttttgaagaaatcatggatgaggcggacaaaataaagaacacgggtaacagactgtttaaagaaggaaaattcgaacttgcaaaggcgaaatatgataaggtgcttagggaatataaccacgtgcatcctcatgatgatgaagagggaaaaatctttgctaattcaagaagttccctacatctaaatgtagccttttgctaccagaagatgggcgaatacagaaaatccattgaaacatgcaataaggtgctggacgcaaatcccgtgcatgtgaaagctctttaccgccgaggaacgtccttcatgttacttggggacttcaacgatgcaaggaatgattttgagaagatgattaccattgacaagtcatcagaacaggacgctacagctgccctccttaaacttaagcagaaggaacaggaagccgaaaagaaggcgaggaagcagttcaaaggactctttgacaagaagccaggagagatatccgaagttggtgtagaatcagacggtggaaaggatgcaggtgatgcaagagtcaatggtggtgaggcaacgagtgctgatagaggtgtaaacacaaatgacagtccgaccagcgaatcagagtacgccttcgaggaagagaggcccgggcttcttggcagcttgtggccctctgcgaggatgatcttctcgtctcttggcatgaacaggtgcgcgatactctga

SEQ ID NO: 222 - protein, 631 aa, Zea mays
MAQDAGDGGGELPPPVKKKSPAEEEAEKRRKKLTPGSLMKGIIRSGSGDATPAEGDQVILHCTTRTIDGIVVNSTRREHGGKGIPLRFVLGKSKMILGFAEGFPTMLKGEIAMFKMQPKIHYAEDDCPVATPDGFPKDDELQFEIEMLDFFKAKVVADDLGVVKKIVEEGKGWETPREPYEITARITARTADGKEIIPSKEEAYFFTIGKSEVPKGLEMGIGTMSHKEKAIIFVSSTYLTKSSLMPQLEGLEEVHFYIELVQFIQVRDMLGDGRLIKRRVFDGKGEFPMDCPLHDSLLRVHYKGMLLDEPKSVFYDTRADNDGEPLEFCSGEGLVPEGFEMCVRLMLPGEKSIVTCPPDFAYDKFPRPANVPEGAHVQWEIELLGFEMPKDWTGLTFEEIMDEADKIKNTGNRLFKEGKFELAKAKYDKVLREYNHVHPHDDEEGKIFANSRSSLHLNVAFCYQKMGEYRKSIETCNKVLDANPVHVKALYRRGTSFMLLGDFNDARNDFEKMITIDKSSEQDATAALLKLKQKEQEAEKKARKQFKGLFDKKPGEISEVGVESDGGKDAGDARVNGGEATSADRGVNTNDSPTSESEYAFEEERPGLLGSLWPSARMIFSSLGMNRCAIL

SEQ ID NO: 223 - DNA, 1125 bp, Zea mays
atggctgtcgtcgaagaagacgctgcggcgtctgcagatcccgccgccgcgtccgatcccgccgctggctccagcgaaaacgagatcacagtagaagaggcttctttcgtgcattctgaacctccccaggatggcagcgccccacccgtggtttcctctgacatggaggcccttcacgacaaggttaagaagcaaatcatcaaagaaggccatggcaggaaaccgctgaagttcgcgacgtgctttgtgcactatagagcatgggttcaaggatcatcgcataaatttgaggatacctggcaagagcaacatccaattgaactagtacttggaaaagagaaaaaacaaatgtctggtttaggcatcggtgttggcagcatgaaaagcggggagcgtgcattgttgcatgttggttgggagctaggctatggcaaagaaggaagtttttcattcccaaatgtccctccaatggcagaccttgtttatgaagttgaactcattggatttgatgatgttaaagagggtaaatcccgaagtgacatgacagttgaagagaggattgcagctgcagacaggagaaagattgagggcaatgcatatttcaaagaaaagaagcttgaggaggccatgcagcaatatgaaatggcgattgcatacatgggagatgatttcatgtttcaattatttggaaagtacagagacatggccttggctgtgaaaaatccatgccatctcaatatggctgcatgcctgatcaaactaaagagattcgatgaagctattgcgcagtgtagcattgttttgacagaagatgaaagtaatgtcaaagcgctgttcaggcgaggaaaagctaaatctgaacttggccagacagaatcagcgagggaagatttcctcaaagcgaagaagtactccccagaagacaaggagatcattcgggagctccgtttgctcgcggaacaagacaaggcactataccagaagcagaaggagctctacaaaggtctctttgggccaagtcctgaagcgaaaccgaagaaggcaaagtacctcgttgtgttttggcagtgcctggtgtcatttatcctttatctggctgggatgttcaaacggaagaacgagtag

SEQ ID NO: 224 - protein, 374 aa, Zea mays
MAVVEEDAAASADPAAASDPAAGSSENEITVEEASFVHSEPPQDGSAPPVVSSDMEALHDKVKKQIIKEGHGRKPLKFATCFVHYRAWVQGSSHKFEDTWQEQHPIELVLGKEKKQMSGLGIGVGSMKSGERALLHVGWELGYGKEGSFSFPNVPPMADLVYEVELIGFDDVKEGKSRSDMTVEERIAAADRRKIEGNAYFKEKKLEEAMQQYEMAIAYMGDDFMFQLFGKYRDMALAVKNPCHLNMAACLIKLKRFDEAIAQCSIVLTEDESNVKALFRRGKAKSELGQTESAREDFLKAKKYSPEDKEIIRELRLLAEQDKALYQKQKELYKGLFGPSPEAKPKKAKYLVVFWQCLVSFILYLAGMFKRKNE

SEQ ID NO: 225 - DNA, 387 bp, Zea mays
atggcttcctccgccctgccttccagaaccttgcaccgccgcgcgctcccctcgtctacgccgtgccaccctgcgacggagaccttcgcccccggcgccgtctcccggcggcgagcagccgtgcggctcctctccgccgggttcctgaccgccgtcgcgccgccgccgtcgctcgccgcgaggaggggacgcgttgtcgtgccaccggaggactacgccactgcacccgatggtctcaagtactacgatcttgtcgaagggaagggaccaactgctgagaagggctcaaccgtgctggtccacttcgactgcatttaccgtggcatcaccgcggtgtcgagccgtgagtcgaagctcctggcggggaaccggagcatcgcccagtag

SEQ ID NO: 226 - protein, 128 aa, Zea mays
MASSALPSRTLHRRALPSSTPCHPATETFAPGAVSRRRAAVRLLSAGFLTAVAPPPSLAARRGRVVVPPEDYATAPDGLKYYDLVEGKGPTAEKGSTVLVHFDCIYRGITAVSSRESKLLAGNRSIAQ

SEQ ID NO: 227 - DNA, 468 bp, Zea mays
atggggaagatgcggcagctgatctgcctcgtggccgccgtcgccgccgcggccatcctcctgacagcgtcggccaagaagtccggcgacgtcaccgagcttcagatcggcgtcaagtacaagcctgagtcatgtacgctgcaagcacacaaaggagacaaaattaaggttcactatcgtgggacactcactgatggatcagttttcgattctagctatgacagaggtgacccgtttgaattcactcttggaaatggccaagtgataaaaggttgggaccaaggattgctcggtatgtgcgtgggtgaaaagaggaagctaaagatacctgcaaagatgggttatggtgagcgaggctccccaccaaagattccaggtggagcaactctgatcttcgacacggagcttatcgccgtcaacgggaagacatccggcggtgcaaaggcagagagtgacagtgagctctga

SEQ ID NO: 228 - protein, 155 aa, Zea mays
MGKMRQLICLVAAVAAAAILLTASAKKSGDVTELQIGVKYKPESCTLQAHKGDKIKVHYRGTLTDGSVFDSSYDRGDPFEFTLGNGQVIKGWDQGLLGMCVGEKRKLKIPAKMGYGERGSPPKIPGGATLIFDTELIAVNGKTSGGAKAESDSEL

SEQ ID NO: 229 - DNA, 1767 bp, Zea mays
atggcggatgactcgttcgacctccccagcgctagcgaggaggatgtgatgggaggcctggatgaggacgaggccatgaaggacctcgagaccgggatggacgatgaggactatttgccaccgacgatgaaggttggggaggagaaggagatcgggaacgaggggctcaagaagaagcttgtcaaggagggcgaggggtgggatcgccccgagtttggagacgaggtggaagtgcattacactggtacccttttggacggaacgaagtttgattcgagccgtgaccgtggaaccccattcagattcaaacttgggcaagggcaagtgattaagggatgggacctggccatcaagaccatgaagaagggtgagaacgcaatcttcactattccgccgggtcttgcctacggcgagatgggttcaccgcctaccatcccgcccaatgccacactccagttccatgttgagctcctttcttgggccagcgtcaaagacatatgcaaggacggtgggatttttaagaagatcatcgttgaaggggagaagtgggagaaccccaaggaccttgatgaagtttttgtcaagtacgaggtaaggctcgaggatggaactgttgtgtccaagtctgatggtgttgagtttgctgtcagagatggttatttctgcccggcactttcaaaggctgtgaagacaatgaagaagggcgaaaaggttctcctcaatgtcaagccacaatatggcttcagggaagaaggaaaaccagcgtctagagatgaagctgcagtgcctccaaatgctgtgctgcatatagatcttgagctggtctcttggaagactgtgatgcttatcggagatcacaagaggatcttgaagaaagttcttaaggaaagcgaaggctatgagggtcctaatgatggagcagtagtgaaagtgagatttattggcaaattggaggatggtactgtgtttgtaaagaaagggcatgatggtgaagagccttttgagttcaagacagatgaggagcaggttattgaagggcttgacataacggtagttaatatgaagaaaggagaggttgcgttggctagagtaccacctgaacaagcatttggatctgtagaaacaaatcaagatcttgctactgttcctcctaattctaccgtcttgtatgaagtggagcttgtttcctttgagaaggagaaagaatcttgggacttgaagaccaatattgagaagattgaagcagctgccaagaagaaagatgaagggaatgtgtggttcaagatgggcaagtacgccaaggcctccaagagatacgagaaggctgcaaaatacatcgagtatgacagctctttcaatgaggatgagaagaagcaatctaaagctctgaaagtcagttccaagctcaacaatgcagcctgcaagctgaaaatgaaagaatacagagaagcagagaaactttgcacaaaggttctggaacttgagagcacaaatgttaaggccttgtacagaagggcgcaagcatacatcgagcttgttgacctagagctagcagagttggatgtgaagaaagcactggaaattgatcctgataacagggatgtgaagctggtgtacaagaccctgaaggagagaatgagggagtacaacagacgggatgccatgttctatggcaacatgttcgcgaaatggaggaagcttgaacagctgcagaaggtgcccgggaagcaggaaccgcaacctatggccatcgacagtgccgcataa

SEQ ID NO: 230 - protein, 588 aa, Zea mays
MADDSFDLPSASEEDVMGGLDEDEAMKDLETGMDDEDYLPPTMKVGEEKEIGNEGLKKKLVKEGEGWDRPEFGDEVEVHYTGTLLDGTKFDSSRDRGTPFRFKLGQGQVIKGWDLAIKTMKKGENAIFTIPPGLAYGEMGSPPTIPPNATLQFHVELLSWASVKDICKDGGIFKKIIVEGEKWENPKDLDEVFVKYEVRLEDGTVVSKSDGVEFAVRDGYFCPALSKAVKTMKKGEKVLLNVKPQYGFREEGKPASRDEAAVPPNAVLHIDLELVSWKTVMLIGDHKRILKKVLKESEGYEGPNDGAVVKVRFIGKLEDGTVFVKKGHDGEEPFEFKTDEEQVIEGLDITVVNMKKGEVALARVPPEQAFGSVETNQDLATVPPNSTVLYEVELVSFEKEKESWDLKTNIEKIEAAAKKKDEGNVWFKMGKYAKASKRYEKAAKYIEYDSSFNEDEKKQSKALKVSSKLNNAACKLKMKEYREAEKLCTKVLELESTNVKALYRRAQAYIELVDLELAELDVKKALEIDPDNRDVKLVYKTLKERMREYNRRDAMFYGNMFAKWRKLEQLQKVPGKQEPQPMAIDSAA

SEQ ID NO: 231 - DNA, 723 bp, Zea mays
atgatgcttctcgccaagctcggggcgccgagcgttccagggaagcgtcgagttgaagaagatgctataagttgcagaatagaaacataccatggttgtgtcatggacagaaggaaactgctgttggtccctgcgattagtatggccattgcctcctttcagtacacttttgtcaagggaatagcaaaagctgaatttgctgatatgcctgcacttcgcggtaaagattatggaaagacaaaaatgcggtatccagattacactgaaacggaatcaggcctccagtacaaggattattttcatggcaaaatacaggacttgcgggttggtgatggcccttctccaaaaaaaggggagactgttgttgttgattgggatggctatacaattgggtactatggtcgtatctttgaagctcgaaacaagaccaaaggaggttcatttgagggtggtgacaaagacttcttcaagttcaaagttggatcaggacaggtcataccagcttttgaggaggctatatcaggcatggccccaggaggtgttaggaggatcattgtaccaccggatcttggatacccagataatgactacaacaagttgggtccaaaaccaacgacattctcgggacaaagagctcttgattttgttctacgtaatcaaggcttaatagataaaactctcctgtttgacatcgagcttctcaagataattccaaatcagtag

SEQ ID NO: 232 - protein, 240 aa, Zea mays
MMLLAKLGAPSVPGKRRVEEDAISCRIETYHGCVMDRRKLLLVPAISMAIASFQYTFVKGIAKAEFADMPALRGKDYGKTKMRYPDYTETESGLQYKDYFHGKIQDLRVGDGPSPKKGETVVVDWDGYTIGYYGRIFEARNKTKGGSFEGGDKDFFKFKVGSGQVIPAFEEAISGMAPGGVRRIIVPPDLGYPDNDYNKLGPKPTTFSGQRALDFVLRNQGLIDKTLLFDIELLKIIPNQ

SEQ ID NO: 233 - DNA, 1572 bp, Zea mays
atgaaaaaaggcgaaaatgctgtgttcaccatcccaccagagcttgcatatggtgaagatggctcaccaccagtcatccctccaaatgccacactgcaatttgatgttgagcttctgtcatgggtgtgtatcaaggacatttccaaggatggaggcatcttaaaaaaggtagtagccaagggcgataagtgggagaaccccagagatcctgatgaagttgttgttaagtatgaagcaaggcttgaggatggaacagttgtatcgaaatctgatggtgttgagttcactgtgagagatggcgtattctgccctgccatatcaaaggctgtcaagactatgaagaaaaacgagaaggcccacctcactgtcatgccacaatatggctttggtgtgaaaggtagacaggcatctggagaagaagcttctgtgcctcctaacgcgacattgcacattgatcttcaagtggtgtcctggaggacagtcactgagttaggcagtgacaaaaagatccttaagaagatccttaaggagggcgaaggctatgattgtcccaatgattgtgcagttgtccgagtgaaacttattgggaagttggaggatggtaccttgtttgtcaagaaaggtcatgatggtgaggagccatttgagttcaagactgatgaggatcaagtgattgaagggcttgacaaagcagtactcagcatgaagaaaggagaagtatccttggtcactattcctccacatcatgcctttggaactaatgaaacaactaaagatctggctacagttccaccaaactcatatgtttactacgaaatggagcttgtctcatttgataaggagaaagattcatgggacttgaagaacgttgctgagaagattgaagcagctgctaagaagaaagaagaagggaatgtgtggtttaaaattggcaagtatgccagggcttctaagagatatgaaaaggctttgagctttgtcgagtacgatagctccttcactgaagaagagaagcagctatcgaaaccacttcagataagctgcaagctcaacaatgccgcatgtaaactaagacttaatgattacaaggaagcaaaggaactgtgtaccgaggtcctggaatctgacaacacaaacgtgaaggccttgtacagaagggcacaggcacacatgcatcttgttgatcttgatttggcagaggcagatatcaagaaagctctagaaatagatcctgacaacagggatgtgaagatggggtacaagaggctaaaggagaaggtcaaggagtacaaaagaagggatgccaaattatatggcaacatgatttccaagttgagcaagcttgaagacacggaagataatggccaaatgagtcaggcagtaaacaagaagcgtgagctcttatggccactggcggaaatgcttaggagattcttcactgccgatggtagcaagggttccacgctgtggcttgtgctgaggctattgatcccggtaatagtattggttgcagtttgtgtgggttacttcatgcacagcagtgttgaagagatagactgcatcaactgttag

SEQ ID NO: 234 - protein, 523 aa, Zea mays
MKKGENAVFTIPPELAYGEDGSPPVIPPNATLQFDVELLSWVCIKDISKDGGILKKVVAKGDKWENPRDPDEVVVKYEARLEDGTVVSKSDGVEFTVRDGVFCPAISKAVKTMKKNEKAHLTVMPQYGFGVKGRQASGEEASVPPNATLHIDLQVVSWRTVTELGSDKKILKKILKEGEGYDCPNDCAVVRVKLIGKLEDGTLFVKKGHDGEEPFEFKTDEDQVIEGLDKAVLSMKKGEVSLVTIPPHHAFGTNETTKDLATVPPNSYVYYEMELVSFDKEKDSWDLKNVAEKIEAAAKKKEEGNVWFKIGKYARASKRYEKALSFVEYDSSFTEEEKQLSKPLQISCKLNNAACKLRLNDYKEAKELCTEVLESDNTNVKALYRRAQAHMHLVDLDLAEADIKKALEIDPDNRDVKMGYKRLKEKVKEYKRRDAKLYGNMISKLSKLEDTEDNGQMSQAVNKKRELLWPLAEMLRRFFTADGSKGSTLWLVLRLLIPVIVLVAVCVGYFMHSSVEEIDCINC

SEQ ID NO: 235 - DNA, 1335 bp, Zea mays
atggcgttctggggggtggaagtgaagcccgggaagccctacacccacatccatcacgctgaccatggccgcctccgcatttgccaggctacactgggcaactgtgatgctgctgcaaggacggtgctgcaatgcaatgttggcaacaagattcccatcaaactttgtagtctaaatccgaaattggccgagacatgccatctagaggttgagtttgaggaggttgatgatgttatcttctcagtaattggtcatagttcgatacatctctctggatactatgtctgtgcaagcaacaggtctaatgtgggggatgatgaatcagaatcttatggggaagatattgggcactccagcaccgatgaggagcatgataccagtgaggacagctatgaatctgacttcattgatgatcgtgaagttccattatctgagaagtatgggtctggttctatagatgacagtgatgatgagtgcacccaacgatgccacagacaaaaagctgaaaaaacgactcaaaatgctgaaagacggcggcgcttgaagaagcaccaagtaggtagcactgattacgatgatgatgatactccagtcatgaaacatgttgcgaagcgctgtgctcctaaaatatctgatagtggtgatgatgacactcctgtcacaaaacctgttgtcaaacgtagagcttcaatatttgatagtgacagtgatgaagatgataatgtacctatttctcttgcattgggtaagaaagacaatgctaaggttgctgaggaaactgaacatcaaaatggacaggcaaatggcatcaccaaaaaaaggattattgatgtcaagaaaagaaaacagtcttccatcagcgaggatcctgcatcgtcaatggatatgacagatgctaatgcaccatctgtttcaaaacaagttgatgaaataaaaaagaaatcaaagaaaaagatgagaaatcaatcaggggaaaataatgagaagcagtccaatataagaacattggatgacgggttggtggttgaatatttgtcaatgggaaacaatgatgcaaaagtggcttctgatggctgcaaggtctatatcaaatatgttggcatgttgaaggatgggaaaattgttgagtctaatgttagtgaaaagccttacaagttcaagcttggtgctggaaaagttatccgtggatgggatgttggtattcatggtatgcgtgttggcgagaaaagaaagcttacagttccaccttcaatgctctctggcggtaaatcagtgggagaagtacccgaaaattcttcagtcatatatgaaatcgagttagtgaaagtgaaataa

SEQ ID NO: 236 - protein, 444 aa, Zea mays
MAFWGVEVKPGKPYTHIHHADHGRLRICQATLGNCDAAARTVLQCNVGNKIPIKLCSLNPKLAETCHLEVEFEEVDDVIFSVIGHSSIHLSGYYVCASNRSNVGDDESESYGEDIGHSSTDEEHDTSEDSYESDFIDDREVPLSEKYGSGSIDDSDDECTQRCHRQKAEKTTQNAERRRRLKKHQVGSTDYDDDDTPVMKHVAKRCAPKISDSGDDDTPVTKPVVKRRASIFDSDSDEDDNVPISLALGKKDNAKVAEETEHQNGQANGITKKRIIDVKKRKQSSISEDPASSMDMTDANAPSVSKQVDEIKKKSKKKMRNQSGENNEKQSNIRTLDDGLVVEYLSMGNNDAKVASDGCKVYIKYVGMLKDGKIVESNVSEKPYKFKLGAGKVIRGWDVGIHGMRVGEKRKLTVPPSMLSGGKSVGEVPENSSVIYEIELVKVK

SEQ ID NO: 237 - DNA, 732 bp, Hordeum vulgare
atggctgctgccgcctcttcctcggcctcgccgattctcctcccgccagggccgcgtggcgctagctcgagggcctggtttcccagcggcggcggcagggcgttcgtcagaggtggcaacagctgggcgccgtgctgctgcagggctgccgctggcggaagcttgccgcaatgcggaggagctgacgacaacggcggcggcgtggtcacccggaggggcgtggtcggggcggttgctctcggggtgtcctcgtccgcgttttgcctgcaggccgcgctcgacgccgtcgccggcgggctgccgccggaggagaagcccaagctctgcgacgccgcctgcgaggcagagctcgaaaatctgcctatggtgactacggaatccggtttgcagtacaaggacatcaaagtcggccgaggcccgagtccgcccattggcttccaggttgctgcaaactgcatcgccatggtgccaaacggacagatatttgacagctcgctggagaaaggccagccctacatattccgtgttggcgccggacaggtgataaagggacttgatgaagggatcttgtcgatgaaagttggaggattacgtcggttgtacatacccggtcaattagcattccctaagggccttacttcagctcccgggaggccaagagtggctccgagcagccctgtcgtatttgacgtcaacctattgttcatacctggtcttgatgacgatgagtga

SEQ ID NO: 238 - protein, 243 aa, Hordeum vulgare
MAAAASSSASPILLPPGPRGASSRAWFPSGGGRAFVRGGNSWAPCCCRAAAGGSLPQCGGADDNGGGVVTRRGVVGAVALGVSSSAFCLQAALDAVAGGLPPEEKPKLCDAACEAELENLPMVTTESGLQYKDIKVGRGPSPPIGFQVAANCIAMVPNGQIFDSSLEKGQPYIFRVGAGQVIKGLDEGILSMKVGGLRRLYIPGQLAFPKGLTSAPGRPRVAPSSPVVFDVNLLFIPGLDDDE

SEQ ID NO: 239 - DNA, 729 bp, Sorghum bicolor
atggctgcagcagcgtcctcctctgcctcgccgctcctcctcccctcagggccgaggcatgcgtcggcctcggcgacggcgtggcttcgcggcgccagcgcgttcaggagcagggcgctgacctcagaggcgccgtgctgctgcaaggccgccggtgtcggtggaagcgcggcgcaatgcggggcggctgacgagttcttgatcggtggtggcagcagtacccggagggggatggtaggagtggccctgggagcctctgccttggggctggcagcgtttgacgcggtcgccgccgggttgccgccggaggagaagcccaagctctgcgacgccgcctgcgaaaccgagctcgaaaatgtgcctatggtaactacagaatccggtctgcaatacaaggatatcaaagtgggcgaagggccaagtccacccattggtttccaggttgctgcaaattatgttgctatggtgccaaatgggcagattttcgacagttcactggagaaaggtcagccctacatattccgtgttggatcaggacaggtgattaaggggcttgatgaagggattttgtcaatgaaggttggaggactacgtcggttgtacatacctggtccattagcgtttcctaagggtcttacttcagcacctggaaggccaagagtacctccgagcagccctgttgttttcgatgtcaatttactgtacataccaggtctcgatgatgagtga

SEQ ID NO: 240 - protein, 242 aa, Sorghum bicolor
MAAAASSSASPLLLPSGPRHASASATAWLRGASAFRSRALTSEAPCCCKAAGVGGSAAQCGAADEFLIGGGSSTRRGMVGVALGASALGLAAFDAVAAGLPPEEKPKLCDAACETELENVPMVTTESGLQYKDIKVGEGPSPPIGFQVAANYVAMVPNGQIFDSSLEKGQPYIFRVGSGQVIKGLDEGILSMKVGGLRRLYIPGPLAFPKGLTSAPGRPRVPPSSPVVFDVNLLYIPGLDDE

SEQ ID NO: 241 - DNA, 835 bp, Brachypodium distachyon
atggccgcaaccgcaaccgccccgccgctccttctcccctcaggctcagggccgaggtccgcgtctagggcgtggccgctccgccgcggcggcctcagggcgtcgtgccgctgcagggctgccgtgggcgggaccgcggcgcaatgcggagccgacggcggcgcggcggcggtggtcggcaggaggggcgtgctcggcgggatggcgctcgcggtgtcggtttcctcgtcgcacgctttcggcgtgctgcaggccgcgctcgccggcgggctgccgccggaggagaagcccaagctctgcgacgccgactgcgagaaggaactcgagaatgcgcccatggtgactacagagtctggtctgcagtacaaggacatcagagtgggccaagggccaagcccacccattggtttccaggttgctgcagaatgcatcgccatggtgcccaacgggcagatattcgacagctcgctggagaaaggcacgccctacatcttccgtgttggtgctggacaggttataaaggggcttgatgaagggatcttgtcgatgaaagttggaggattacgccggttgtacatacctggtccgttagcattccccaagggccttacatcagctcctggaaggccaagagtggctccgagcagccccgtcgtatttgatgtcaacctattgtacataccaggtcttgatgatgagtgaaaaggcattaacttgcaaaatttacaggataaagtggagcgaatggtttactgtttttgaattaccacatgtatgtagagagtgaacattgtttccggcagcaaattatatgaaaataaggcgacttttgtca

SEQ ID NO: 242 - protein, 233 aa, Brachypodium distachyon
MAATATAPPLLLPSGSGPRSASRAWPLRRGGLRASCRCRAAVGGTAAQCGADGGAAAVVGRRGVLGGMALAVSVSSSHAFGVLQAALAGGLPPEEKPKLCDADCEKELENAPMVTTESGLQYKDIRVGQGPSPPIGFQVAAECIAMVPNGQIFDSSLEKGTPYIFRVGAGQVIKGLDEGILSMKVGGLRRLYIPGPLAFPKGLTSAPGRPRVAPSSPVVFDVNLLYIPGLDDE

SEQ ID NO: 243 - DNA, 627 bp, Chlamydomonas reinhardtii
atggccctggcgacgcgcaaggcgttctctggcaagtcaacgatttccgctgctcgcagccggaccaccgtgactcgtgtctgctgccaggcaagcggcagcccgcgccggtccttcctgcaacatacggctgccttcaccgctgccgctgccatcctcctcggctcgcagcccggtgccatcgccgccagcctgcccccccaggacattaaggtcatctgcgacgcggagtgcagcgccaagctggagtctgcgcccgaggtgtcgctgcccagcggcctcaagtaccgggaaatcgcggtcggcaacggccccacgccgcccgtgggcttccaggtggtggtgcactatgtggccatgacacctaacctgcgcgtgtttgacagcagccttgacaagggcaagccctacgacatccgtgtgggtgcgggccaggtgatcaagggcctggatgacggcctgctggacatgaagccgggtggcatccgccgcctgtacatccccggcgacatggccttccccaagggcctcaaggccgcgcccggccgccccgccgtgccgccctcgacccccgtggtgttcgacgtgcaactgctgtacatccccggcctggaggcggacgagtaa

SEQ ID NO: 244 - protein, 208 aa, Chlamydomonas reinhardtii
MALATRKAFSGKSTISAARSRTTVTRVCCQASGSPRRSFLQHTAAFTAAAAILLGSQPGAIAASLPPQDIKVICDAECSAKLESAPEVSLPSGLKYREIAVGNGPTPPVGFQVVVHYVAMTPNLRVFDSSLDKGKPYDIRVGAGQVIKGLDDGLLDMKPGGIRRLYIPGDMAFPKGLKAAPGRPAVPPSTPVVFDVQLLYIPGLEADE

SEQ ID NO: 245 - DNA, 645 bp, Volvox carteri
atggcgctggtcacccaaaaggcgttctgctcgccacaggctcatgtcggtggccggacacgcttgagggccgtacgggtctgctgccagtctcggccagagcaagcggccgatgcaccgcggaggaatctgctgcagaagtccgtggcgcttgtggctgcggcagcggtgctagcagggtcgcagtccgccgcggcgttggcggcctcccttcccccccaggacatcaaggtgctctgcgatgtggagtgctccgccgcgctggaggctgtggaggccgtcacactgccctcgggcctcaagtacaaagatatctcccctggaagcggccccagcccgccggttggcttccaggttgtggcgaattacgtggccatgacacctaaccttcgggtctttgatagcagcttggagaagggcaagccgtacgacattcgggtgggtgcgggccagataatcaagggcctggatgaggggctcttggggatgaagcccgggggcatccgcaggctttacattccgggagacctggccttccctaaggggctcaaggccgctccgggcaggcctgctgtaccgcccgcaaccccggtcgtgttcgacgtacagctgctgtacatccccggcttggagggtgacgagtga

SEQ ID NO: 246 - protein, 214 aa, Volvox carteri
MALVTQKAFCSPQAHVGGRTRLRAVRVCCQSRPEQAADAPRRNLLQKSVALVAAAAVLAGSQSAAALAASLPPQDIKVLCDVECSAALEAVEAVTLPSGLKYKDISPGSGPSPPVGFQVVANYVAMTPNLRVFDSSLEKGKPYDIRVGAGQIIKGLDEGLLGMKPGGIRRLYIPGDLAFPKGLKAAPGRPAVPPATPVVFDVQLLYIPGLEGDE

SEQ ID NO: 247 - DNA, 717 bp, Antirrhinum majus
atggcatcatcatcatcatcatcatcatcatcagcgtctttattacttccactcggctctgtgttttgcaagagtaattcagttggcagtcgaagagcttgcaaagtctatgcaggaggtgttagaacacaatccctggtttcagaacaaaaactagaaattttaaagaaaaccgagcaatgggatgagtgtgcattcactaagcgcagaaatttgatcagcaccagttttggacttctaagcctcttgattggttctacgtatgctgaagcaactgggctgcctccagaggataaaccaaagctttgcgacgatgcttgtgagaaagagcttgaaaatgtacctatggtaactactgagtctggtttgcagtacaaggatatcaaagttggtcgaggacctagtcctcctgttggatatcaggtagctgcaaactgtgtagccatggttccttctggccaaatatttgacagttcactggagaaagggcagctttacatattccgcgttggatctgaccaggtgatcaagggactagatgaagggatcctcagcatgaaagttggagggaaacgccggctttacattccaggaccattagcgtttccgaaaggcttgacgtcggctcccgggaggccaagagtggctgcaaacagtccagttgtttttgatgttagtttggagtatattccaggccttgaggatgatgaggagtag

SEQ ID NO: 248 - protein, 238 aa, Antirrhinum majus
MASSSSSSSSSASLLLPLGSVFCKSNSVGSRRACKVYAGGVRTQSLVSEQKLEILKKTEQWDECAFTKRRNLISTSFGLLSLLIGSTYAEATGLPPEDKPKLCDDACEKELENVPMVTTESGLQYKDIKVGRGPSPPVGYQVAANCVAMVPSGQIFDSSLEKGQLYIFRVGSDQVIKGLDEGILSMKVGGKRRLYIPGPLAFPKGLTSAPGRPRVAANSPVVFDVSLEYIPGLEDDEE

SEQ ID NO: 249 - DNA, 732 bp, Aquilegia formosa
atggctgctgcttcttcttcttcttcttcttcgtcacttcaactctcatcatcatcaggttcaattttcactgacaaaagagcatctttaattctatcttcaatttatcaaaccacattcttcttcaagcaaacaagatgtcccatggttgtcagatgttcatcgttaattgaagagcataacaagcatgaacctgtttccttgaaaacgagaagggattatataattggtggtttggttgtattgggaatatctagttttgtcgtctcagattccccaagccaaggagctggtttgcccccagaagaaaaaccaaagctttgtgatcttgaatgtgagaatcagctagaaaatgtccctatggtgacaacggaatcaggtttgcagtacaaggatattaaactcggtgcaggtcctagtccacctgtgggatttcaggttgccgcaaattatgttgccatggttccatctggacaaatatttgacagttctttggagaaaggcacaccatatatttttcgtgttggatctggccaggtgatcaagggactcgatgaagggatcctaagcatgaaggccggaggaatacgcaggctatacattccaggacctttggcatttccgaaaggtctaaattcagctccaggaaggccaagggtgactgcaagtagtccagtggttttcgatgtgagtttggaatacataccaggtcttgatgctgatgaagagtga

SEQ ID NO: 250 - protein, 243 aa, Aquilegia formosa
MAAASSSSSSSSLQLSSSSGSIFTDKRASLILSSIYQTTFFFKQTRCPMVVRCSSLIEEHNKHEPVSLKTRRDYIIGGLVVLGISSFVVSDSPSQGAGLPPEEKPKLCDLECENQLENVPMVTTESGLQYKDIKLGAGPSPPVGFQVAANYVAMVPSGQIFDSSLEKGTPYIFRVGSGQVIKGLDEGILSMKAGGIRRLYIPGPLAFPKGLNSAPGRPRVTASSPVVFDVSLEYIPGLDADEE

SEQ ID NO: 251 - DNA, 705 bp, Arachis hypogaea
atgcctatattggctgcttctctctcctctctccttcttccactaggttctacttgtaaaagtttgagctgcaatcctcaaggcattgcggctgacaggcttcgatgcttggttctgcaataccgaagatccgaggtaaaagcaaaggcctcatatacaactgaatgtgctgctatggttaataccaattcacgcagagactttcttggattggctttgggaatctcaagcctctttgttggttcattggaagccaaaggagctggtttgcccccggaagataagccgaaactatgtgatgaagcttgtgagaaggagcttgaaaatgtgcctatggtaactactgaatcaggtttgcaatacaaggatattaaagttggacaaggtcctagtcccccagttggatttcaggtagcagctaattatgtagcaatggttccttccggacaagtatttgatagttcattggagaaaggccagatttacattttccgtgtcggttctggtcaggtgataaagggtcttgatgaaggtcttctgagcatgagagtaggagggaagcgtcgactgtacatacctggaccattggcattcccaaaaggccttacatcagctccagggagaccaagggtggctccaaatagtccagtcatatttgatgttagtttggaatatataccagggcttgaagtggatgaggaataa

SEQ ID NO: 252 - protein, 234 aa, Arachis hypogaea
MPILAASLSSLLLPLGSTCKSLSCNPQGIAADRLRCLVLQYRRSEVKAKASYTTECAAMVNTNSRRDFLGLALGISSLFVGSLEAKGAGLPPEDKPKLCDEACEKELENVPMVTTESGLQYKDIKVGQGPSPPVGFQVAANYVAMVPSGQVFDSSLEKGQIYIFRVGSGQVIKGLDEGLLSMRVGGKRRLYIPGPLAFPKGLTSAPGRPRVAPNSPVIFDVSLEYIPGLEVDEE

SEQ ID NO: 253 - DNA, 624 bp, Brassica spinosa
atgacgtccatttctctcttacttccactaggttctgcatgtgcggggagtttgtccacttatcatcaatttaacagaggcagatccagaaggatggctcgctcaggacttagggtgaaagcttcacaaatagttggatatgaggatgaatcgattatagttaagcgcagggatgtgattggattgatgtttactgcttcaagccttctgattggttctttgcatgctgaggcagctggcttgccaccacaagagataccgaaactatgtgatgatgattgcgagaaagagcttgaaaatgtacctatggtaactacggagtctggtttgcaatacaaggatataaaagttggttcaggccctagtcctccaattggcttccaggtagcggcaaactatgcagctatggttccatctggacaagtatttgacagttcattggaaaaacgtcagccttacatattccgcgttggctcaggtcaggttggcaagggactcgatgaagggatcctgagcatgaaagttggtggaaaacgtcgactatacattccaggatcagtcccagctggcgttcccgaaaggtctaacttcagctccaggaagggcaagggtaagtgcatatag

SEQ ID NO: 254 - protein, 207 aa, Brassica spinosa
MTSISLLLPLGSACAGSLSTYHQFNRGRSRRMARSGLRVKASQIVGYEDESIIVKRRDVIGLMFTASSLLIGSLHAEAAGLPPQEIPKLCDDDCEKELENVPMVTTESGLQYKDIKVGSGPSPPIGFQVAANYAAMVPSGQVFDSSLEKRQPYIFRVGSGQVGKGLDEGILSMKVGGKRRLYIPGSVPAGVPERSNFSSRKGKGKCI

SEQ ID NO: 255 - DNA, 651 bp, Brassica napus
atggcagcttcctcttctccatctctccttctaccactaggttcagcatctaggaatggtccaaccatgaagactccaagatgcatatctacaagagccatcacagcttcagaaacaagaaacaaaagctgtagccgtagagacgcaatgctattggttctcggcgtgtcaggactctcaatgagctacttgcctgcggcttatgcagctggtttgcctccagaggataaaccgaggctttgtgaagctgaatgcgagaaagagcttgaaaatgttccaatggtaactacagagtcagggcttcagtataaagatatcaaagtgggtaaaggccctagtccccctgttggttatcaggttgctgctaactatgtagctatggttccttcagggcagattttcgacagttctttggagaaaggtctaccgtatctgttccgagttgggtctggccaggtgatcaagggacttgatgaaggactcttgactatgaaagctggtggcaaacgcagactttacattccagggcctttggcgtttccaaagggtttagtctcagctccggggaggccaagagttgcaccgaacagtccagttgtatttgatgtgagcttagagtacataccagggctcgagtcagatgaagagtga

SEQ ID NO: 256 - protein, 216 aa, Brassica napus
MAASSSPSLLLPLGSASRNGPTMKTPRCISTRAITASETRNKSCSRRDAMLLVLGVSGLSMSYLPAAYAAGLPPEDKPRLCEAECEKELENVPMVTTESGLQYKDIKVGKGPSPPVGYQVAANYVAMVPSGQIFDSSLEKGLPYLFRVGSGQVIKGLDEGLLTMKAGGKRRLYIPGPLAFPKGLVSAPGRPRVAPNSPVVFDVSLEYIPGLESDEE

SEQ ID NO: 257 - DNA, 585 bp, Brassica rapa
atgaagactccaagatgcatatctacaagagccatcacagcttcagaaacaagaaacaaaagctgtagccgtagagacgcaatgctattggttctcggcgtgtcaggactctcaatgagctacttgcctgcggcttatgcagctggtttgcctccagaggataaaccgaggctttgtgaagcagaatgcgagaaagagcttgaaaatgttccaatggtaactacagagtcagggcttcagtataaagatatcaaagttggtaaaggccctagtccccctgttggttatcaggttgctgctaactatgtagctatggttccttcagggcagattttcgacagttctttggagaaaggtctaccgtatctgttccgagttgggtctggccaggtgatcaagggacttgatgaaggactcttgactatgaaagctggtggcaaacgcagactttacattccagggcctttggcgtttccaaagggtttagtctcagctccggggaggccaagagttgcaccgaacagtccagttgtatttgatgtgagcttagagtacataccagggctcgagtcagatgaagagtga

SEQ ID NO: 258 - protein, 194 aa, Brassica rapa
MKTPRCISTRAITASETRNKSCSRRDAMLLVLGVSGLSMSYLPAAYAAGLPPEDKPRLCEAECEKELENVPMVTTESGLQYKDIKVGKGPSPPVGYQVAANYVAMVPSGQIFDSSLEKGLPYLFRVGSGQVIKGLDEGLLTMKAGGKRRLYIPGPLAFPKGLVSAPGRPRVAPNSPVVFDVSLEYIPGLESDEE

SEQ ID NO: 259 - DNA, 618 bp, Capsicum annuum
tgtcagacctttcggaaatgccaaagatccaggtacatagagtcgacgtagtcctcccactttcatgctcaggatcccttcgtcaagtcctttgattacctgttcagcgcctacacggaaaatgtaaggtcgacctttctccagggagctgtcaaaaatttgtcctgagggaaccatcgcaacataatttgcagccacctggaaaccaacggggggattagggcctcgaccaactttgatgtccttatactgcaagcctgattcagtcgttatcataggaacattttcaagctctttctcacattcagcatcacaaagctttggtttttcctccggtggcaatccagctgcttcagcataacacgaaccaaccaagaaactcgaaaccccacaaaatcccaaccccattaacaagtctctccgcttagttgttttgtacccatcagcatcttcagtagtacgcatcaaattctcttgtgcccacaatcttaaaccccatttcctcttcaacccattttgcatttgggtttttccaattgtttgatgatgattcttgaacacatttattgaaaaggctgaactgaatggaagtataagggatgttgaattatcacaggg

SEQ ID NO: 260 - protein, 205 aa, Capsicum annuum
MQNGLKRKWGLRLWAQENLMRTTEDADGYKTTKRRDLLMGLGFCGVSSFLVGSCYAEAAGLPPEEKPKLCDAECEKELENVPMITTESGLQYKDIKVGRGPNPPVGFQVAANYVAMVPSGQIFDSSLEKGRPYIFRVGAEQVIKGLDEGILSMKVGGLRRLYVPGSLAFPKGLTSAPGRPRVAPNSPVVFDVSLEYIPGLESDEE

SEQ ID NO: 261 - DNA, 681 bp, Centaurea solstitialis
atggcgtctgcttctctcctacttccactcggttcttctttggccaactatcatccaataaccagaggcaggcccagaagggtggcagcaaaacatttgaattcaggaattagggttaaagcttcacatattgttgggtatgaggatgagtctacgttaattaagcggagagatgtgattggattagctttaggtgcttcaagccttctgattcggtctttgaacgcggaggcagctggcttgccacctcaagagataccaagactatgcgatgatacttgcgagaaagagcttgaaaatgtacctatggtaactacagagtctggtttgcaatacaaggatataaaagttggttctggtcctactcctccagttggttatcaggtagcagcaaactatgttgcaatggttccatctggacaagtattcgacagctcactggaaaagcgtcaggtttacatatttcgtgttgggtcaggtcaggttgtgaaaggattggatgaggggattttgagcatgaaagttggaggaaaacgtcgactatatgttccaggatctttggcatttcccaaaggtctaacttcagctccaggacggcccagagtcgctgcaaacagtcctgtcattttcgatgtcagtttggagtacattcccggccttgatgatgaacaagaagagtga

SEQ ID NO: 262 - protein, 226 aa, Centaurea solstitialis
MASASLLLPLGSSLANYHPITRGRPRRVAAKHLNSGIRVKASHIVGYEDESTLIKRRDVIGLALGASSLLIRSLNAEAAGLPPQEIPRLCDDTCEKELENVPMVTTESGLQYKDIKVGSGPTPPVGYQVAANYVAMVPSGQVFDSSLEKRQVYIFRVGSGQVVKGLDEGILSMKVGGKRRLYVPGSLAFPKGLTSAPGRPRVAANSPVIFDVSLEYIPGLDDEQEE

SEQ ID NO: 263 - DNA, 681 bp, Cucumis melo
atggcgacttcaccctcctcaacgttgctcccgctcggttcaccttctggaatacaccaaggaatttccagtgataaaatacaatctcttgtcgtgcgctgcatgaatgccaatatcagtgcgaaagaatggaggatgaaagagtacgctaaggaattcaatttgactggaagaagagagatgattggtttaatttgtggaatgtcaagtctcgttatagatgctctagatgccaaggcagctggtttgcctccagaggacaagccaagattatgtgacgatgcctgcgagaaagaacttgaaaatgttcctatggtcacgactgagtctggtttgcagtacaaggacatcaaagttggtgggggtcccagtcctcctattggatttcaggtagctgcaaattatgttgcaatggttccatctggacaaatctttgacagttcacttgagaagaatcagctttatatctttcgagttggatctggtcaagtaatcaaaggtcttgatgaagggattttaagcatgaaagtcggaggaaagcgtcgactttacattcccggacctttggcattcccaaaagggctcacatcagctccaggaaggccaagggtggctccaaatagccctgtggtatttgatgtcagtcttgaatacatacctggccttgaagatgaggagtga

SEQ ID NO: 264 - protein, 226 aa, Cucumis melo
MATSPSSTLLPLGSPSGIHQGISSDKIQSLVVRCMNANISAKEWRMKEYAKEFNLTGRREMIGLICGMSSLVIDALDAKAAGLPPEDKPRLCDDACEKELENVPMVTTESGLQYKDIKVGGGPSPPIGFQVAANYVAMVPSGQIFDSSLEKNQLYIFRVGSGQVIKGLDEGILSMKVGGKRRLYIPGPLAFPKGLTSAPGRPRVAPNSPVVFDVSLEYIPGLEDEE

SEQ ID NO: 265 - DNA, 699 bp, Glycine max
tactacaattaaagctagaatggacaaactcattttattcctcatccacttcaagccccggtatgtattccaaactaacatcaaatatgactggactgcttggagccacccttggtcttccaggagcagaagtaaggccttttgggaatgccagtgatccgggtatgtacagtcgacgtttccctcctactttcatgctcagaataccttcatcaagtccttgtatcacctgaccagaaccaacacgaaaaatataaggctgacctttctccagtgaactatcaaatatttgtccggagggaaccattgcaacataattagcagccacctgaaatccaattggtggactaggaccttgtccaactttaatatccttgtattgcaaacctgatccagtagttaccgtaggcacattttcaagctctttctcacaagtgtcatcacacagtttaggctttccctctgggggcaaaccagctccatttgcatccagcgaaccgatgaagagacccgagactcctaaagctaacccaagaaagtctctacgtgaattggcattaaacatagctgtggtgcattcccttgtctctgaggacttgactttaatcactaatcttcgaagtttgtcaaccaaaatgctttgaggaggagcaaaagagggacttttaccacaagtagaaccaagttggagaagcagag

SEQ ID NO: 266 - protein, 232 aa, Glycine max
MTSLVMPTMASSLLLQLGSTCGKSPSFAPPQSILVDKLRRLVIKVKSSETRECTTAMFNANSRRDFLGLALGVSGLFIGSLDANGAGLPPEGKPKLCDDTCEKELENVPTVTTGSGLQYKDIKVGQGPSPPIGFQVAANYVAMVPSGQIFDSSLEKGQPYIFRVGSGQVIQGLDEGILSMKVGGKRRLYIPGSLAFPKGLTSAPGRPRVAPSSPVIFDVSLEYIPGLEVDEE

SEQ ID NO: 267 - DNA, 678 bp, Gossypium hirsutum
atgtcttcttctccttcctctttgttgctgccccttggttctgcatctgagaagaaactgtatgccaatcatatggccttctcaaatatcagggctcaagctataattgttaggtcttcaagttgtaagacaaggaaatacagcaatggaccggatttagttacacgaagggatgtgatggggttgcttttcgtagttccgatcatctcgttgaactcgccagatgccgatggtgccggcttgccacctgaagaaaagccgaaactatgcgatgatgcctgcgagaaggagcttgaaaatgtacctatggtaactacggaatccggtttgcagtacaaggatattaaagttggtgaaggtcccagtcctccagttggttttcaggttgctgctaattacgtcgcaatggttccttccggacaaatattcgatagttcgctggagaaaggtcagccctacatatttcgagttggatccggacaggtgataaaggggcttgatgaggggattttgagcatgaaaataggagggaagcgcagactttatattccgggaccactggcattcccgaagggtttaacttctgcaccaggaagaccaagggtggctccaagtagcccagtcgtttttgatgtgagtttggaatacatacctggacttgaagatgaagaactataa

SEQ ID NO: 268 - protein, 225 aa, Gossypium hirsutum
MSSSPSSLLLPLGSASEKKLYANHMAFSNIRAQAIIVRSSSCKTRKYSNGPDLVTRRDVMGLLFVVPIISLNSPDADGAGLPPEEKPKLCDDACEKELENVPMVTTESGLQYKDIKVGEGPSPPVGFQVAANYVAMVPSGQIFDSSLEKGQPYIFRVGSGQVIKGLDEGILSMKIGGKRRLYIPGPLAFPKGLTSAPGRPRVAPSSPVVFDVSLEYIPGLEDEEL

SEQ ID NO: 269 - DNA, 585 bp, Guizotia abyssinica
atggcatccacctccctccttccgctcggttctttttctgggaatttgacgagcaatggtcgaataaccggaggcagaccgagaagagtgacagcccaatgtttgaggttgggatttgacatgaaaggttcacaaattttttggtgtgaaggtgaattagggttaattaaccgaagggttgtgatcggattaggtttaagtgcttcaagccttctagggcgctccccgaatgcgaagtcagctggcttgccacctgaggagataccaaaactttgtgatgattcttgtgaaaaagagcttgaaaatgtacctatgataactacagaatctggtttacaatacaaggatataaaagttggttctggccctactcccccagttggttatcaggtagctgcaaactatgtagcaatggttccatccggacaagtatttgacagttcactggaaaaaaaacaagtttacatatttcgtgttgggtcaggtcaggttgtcaaaggactcgatgaaggaattctaagcatgaaggttggaggaaaacgtcgactatatgttccaggatccttggcatttccaagggtctaa

SEQ ID NO: 270 - protein, 194 aa, Guizotia abyssinica
MASTSLLPLGSFSGNLTSNGRITGGRPRRVTAQCLRLGFDMKGSQIFWCEGELGLINRRVVIGLGLSASSLLGRSPNAKSAGLPPEEIPKLCDDSCEKELENVPMITTESGLQYKDIKVGSGPTPPVGYQVAANYVAMVPSGQVFDSSLEKKQVYIFRVGSGQVVKGLDEGILSMKVGGKRRLYVPGSLAFPRV

SEQ ID NO: 271 - DNA, 684 bp, Helianthus annuus
atggcgtccacctctctccttccactcggttctttttctgggaatctgtctagcaatcatcgaataacacgaaacagaccgagaagagtgacggctcaatggttacggtcgggaattgacacgaaagggtcacaaattgttgtgtgtgagggtgaattatcgttaattaagcgaaggggtgtgatcggattaggtttaagcgcttcaagccttctatttcactccccggatgcggagtcagctgggttgccacctcaggagataccgagattatgtgatgattcttgtgaaaaggagcttgaaaatgtgcctatggtaactacagaatctggtttacaatacaaggatattaaggttggatctggcccttctcccccagttggttatcaagtagctgcaaactatgtagcaatggttccaactggacaagtatttgacagttcactggaaaaacgccaagtttacatatttcgtgttgggtcaggtcaggttgtcaaaggactcgatgaaggaattctgagcgtgaaggttggaggaaaacggcgactatatgtgcctggatctttggcatttcccaagggtctaacttcagctccgggacggcctagagttgctccaaatagtccggtcattttcgacgtgagtttggagtacataccaggacttgatgatgatgaagagtaa

SEQ ID NO: 272 - protein, 227 aa, Helianthus annuus
MASTSLLPLGSFSGNLSSNHRITRNRPRRVTAQWLRSGIDTKGSQIVVCEGELSLIKRRGVIGLGLSASSLLFHSPDAESAGLPPQEIPRLCDDSCEKELENVPMVTTESGLQYKDIKVGSGPSPPVGYQVAANYVAMVPTGQVFDSSLEKRQVYIFRVGSGQVVKGLDEGILSVKVGGKRRLYVPGSLAFPKGLTSAPGRPRVAPNSPVIFDVSLEYIPGLDDDEE

SEQ ID NO: 273 - DNA, 684 bp, Helianthus exilis
atggcgtccacctctctccttccactcggttccttttctgggaatctgtccagcaatcatcgaataacacgaaacagaccgagaagagtgacggctcaatgtttgcggtcgggaattgacacgaaagggtcagaaattgttgggtgtgagggtgaattatcgttaattaagcgaaggggtgtgatcggattaggcttaagcgcttcaagccttctatttcactccccggatgcagagtcagctggcttgccacctcaggagataccaagattatgtgatgatacttgtgaaaaggagcttgaaaatgtgcctatggtaactacagaatctggtttacaatacaaggatattaaggttggatctggcccttctcccccagttggttatcaggtagctgcaaactatgtagcaatggttccaactggacaagtatttgacagttcactggaaaaacgccaagtttacatatttcgtgttgggtcaggtcaggttgtcaaaggactcgatgaaggaattctgagcatgaaggttggaggaaaacggcgactatatgtgcctggatctttggcatttcccaagggtctaacttcagctccgggacggcctagagttgctccaaatagtccggtcattttcgacgtgagtttggagtacataccacgacttgatgatgatgaagagtaa

SEQ ID NO: 274 - protein, 227 aa, Helianthus exilis
MASTSLLPLGSFSGNLSSNHRITRNRPRRVTAQCLRSGIDTKGSEIVGCEGELSLIKRRGVIGLGLSASSLLFHSPDAESAGLPPQEIPRLCDDTCEKELENVPMVTTESGLQYKDIKVGSGPSPPVGYQVAANYVAMVPTGQVFDSSLEKRQVYIFRVGSGQVVKGLDEGILSMKVGGKRRLYVPGSLAFPKGLTSAPGRPRVAPNSPVIFDVSLEYIPRLDDDEE

SEQ ID NO: 275 - DNA, 684 bp, Helianthus tuberosus
atggcgtccccctctctccttccactcggttctttttctgggaatctgtccagcaatcatcgaataacacgaaacagaccgagaagagtcacggctcaatgtttgcggtcgggaactgacacgaaagggtcacaaattgttgggtgtgagggtgaattatcgttaattaagcgaaggggtgtgatcggattaggtttaagcgcttcaagccttctatttcactccccggatgcagagtcagctggcttgccacctcaggagataccaacattatgtgatgatacttgtgaaaaggagcttgaaaatgtgcctatggtaactacagaatctggtttacaatacaaggatattaaggttggatctggcccttctcccccagttggttatcaggtagctgcaaactatgtagcaatggttccatctggacaagtatttgacagttcactggaaaaacgccaagtttacatatttcgtgttgggtcaggtcaggttgtcaaaggactcgatgaaggaattctgagcatgaaggttggaggaaaacggcgactatatgtgcctggatctttggcatttcccaagggtctaacttcagctccgggacggcctagagttgctccaaatagtccggtcattttcgacgtgagtttggagtacataccaggacttgatgatgatgaagagtaa

SEQ ID NO: 276 - protein, 227 aa, Helianthus tuberosus
MASPSLLPLGSFSGNLSSNHRITRNRPRRVTAQCLRSGTDTKGSQIVGCEGELSLIKRRGVIGLGLSASSLLFHSPDAESAGLPPQEIPTLCDDTCEKELENVPMVTTESGLQYKDIKVGSGPSPPVGYQVAANYVAMVPSGQVFDSSLEKRQVYIFRVGSGQVVKGLDEGILSMKVGGKRRLYVPGSLAFPKGLTSAPGRPRVAPNSPVIFDVSLEYIPGLDDDEE

SEQ ID NO: 277 - DNA, 732 bp, Lasiurus cinereus
atggctgctgctgcctcttcctcggcctcgccgcttctcctcccgtcagggccgcgtggcgctagctcgagggcctggcttcccagcggcggcggcggcagggcgttcatcagaggtggcaacagcagggcgccatgctgctgcagggctgccgctggcggaagcgcggcgcaatgcggaggagctgacgacgacgacggcgtggtcacccggaggggcgtggtcggggcggtggctctcggggtgtcgtcgtctgcgttatgcctgcaggccgcgctcgacgccgtcgccggcgggctgccgccggaggagaagcccaagctctgcgacgccgcctgcgaggcagagctcgaaaatctgcctatggtgactatggaatccggtttgcagtacaaggacatcaaagtcggccaagggccgagtccgcccattggcttccaggttgctgcaaattgcatcgccatggtgccaaacggacagatatttgacagctcgctggagaaaggccagccctacatattccgtgttggcgcaggacaggtgataaagggacttgatgaagggatcttgtcaatgaaagttggaggattacgtcggttgtacatacccggtcaattagcattccctaagggccttacttcagctcccgggaggccaagagtggctccgagcagccccgtcatatttgacgtcaacctattgtacatacctggtcttgacgacgatgagtga

SEQ ID NO: 278 - protein, 243 aa, Lasiurus cinereus
MAAAASSSASPLLLPSGPRGASSRAWLPSGGGGRAFIRGGNSRAPCCCRAAAGGSAAQCGGADDDDGVVTRRGVVGAVALGVSSSALCLQAALDAVAGGLPPEEKPKLCDAACEAELENLPMVTMESGLQYKDIKVGQGPSPPIGFQVAANCIAMVPNGQIFDSSLEKGQPYIFRVGAGQVIKGLDEGILSMKVGGLRRLYIPGQLAFPKGLTSAPGRPRVAPSSPVIFDVNLLYIPGLDDDE

SEQ ID NO: 279 - DNA, 708 bp, Solanum lycopersicon
atggcatcaacatctcttgtacttccactcagttcagccttttctataaatttgttcaagaatcatcatcaaagaatcagaaaactccaaactggaaatggggttactagggaatttggtttaagattgtgggcacaagagaatttgatgggtactgttgaagaagctgaaaggtacaatacaactaagcgcagagatttggtaatggggttggggttctgtggagttacaagttttttggtgggttcttgttatgctgaggcagctggattgccacctgaggaaaaaccaaaactttgtgatgctacatgtgagaaagagcttgaaaatgttcctatggtaacaaccgaatcaggtttgcagtataaggacatcaaagttggtcgaggccctagtccccctgttggtttccaggtggctgcaaattatgttgccatggttccctcgggacaaatttttgacagctccctggagaaaggtcgaccttacattttccgtgtaggtgctgaccaggtaatcaaaggacttgatgaagggattctgagcatgaaagttggaggactacgtcgactctatgtacctggatctttggcgtttccaaaaggtctgatatcggctcctggaaggccaagagtggctcctaacagcccactggtattcgacgtgagtttggagttcatacctggccttgaatccgacgaagagtga

SEQ ID NO: 280 - protein, 235 aa, Solanum lycopersicon
MASTSLVLPLSSAFSINLFKNHHQRIRKLQTGNGVTREFGLRLWAQENLMGTVEEAERYNTTKRRDLVMGLGFCGVTSFLVGSCYAEAAGLPPEEKPKLCDATCEKELENVPMVTTESGLQYKDIKVGRGPSPPVGFQVAANYVAMVPSGQIFDSSLEKGRPYIFRVGADQVIKGLDEGILSMKVGGLRRLYVPGSLAFPKGLISAPGRPRVAPNSPLVFDVSLEFIPGLESDEE

SEQ ID NO: 281 - DNA, 699 bp, Malus x domestica
atggcttcgtcttcctccactctgctctttccatttggttcatcttctggaaaaaggatgtccgcagattaccaaggcgtttcctgcgacagggttcaagggatgctaatccgatgttctaattcacaagttactgtaaatgctacaaggtcaagagtatgtaaggatgcatttaacgtgatcaaaagaagagatatgatagggttgcttttcggagtttcaagcgctgtgacaggcgcatttgaagctgagggagctggtctgcccccagaagagaagcctcgactgtgtgataattcttgcgagaaggagcttgaaaatgtgcctatggttactacagagtctggtttgcagtacaaggatattaaagttggtcaaggccccagtccaccagtcggttttcaggtagcagcgaattatgtagccatggttccatctggacaaatatttgacagttcattggagaagggtcaagtttatatatttcgtgttggctctggtcaggtgatcaagggacttgatgaagggatcttgtccatgaaagtaggagggaagcgacgactctacatcccaggatcgctggcgtttcccaagggtctcaattcagctccagggagaccaagggtggctccaagcagtccggttgttttcgacgtgagcttggaatacgtaccaggccttgacattgaggaagagtaa

SEQ ID NO: 282 - protein, 232 aa, Malus x domestica
MASSSSTLLFPFGSSSGKRMSADYQGVSCDRVQGMLIRCSNSQVTVNATRSRVCKDAFNVIKRRDMIGLLFGVSSAVTGAFEAEGAGLPPEEKPRLCDNSCEKELENVPMVTTESGLQYKDIKVGQGPSPPVGFQVAANYVAMVPSGQIFDSSLEKGQVYIFRVGSGQVIKGLDEGILSMKVGGKRRLYIPGSLAFPKGLNSAPGRPRVAPSSPVVFDVSLEYVPGLDIEEE

SEQ ID NO: 283 - DNA, 690 bp, Medicago truncatula
atgcctagcatggcttcccctcttctgcttccactttattctacttgtggtaaaattccttctcttactgcttctcaaagcatttctgttgagaaacttagaagatttgctcttaaagtcaagtccacagagacaagggaatgcactgctaatgatatttttaataccaattcacgtagagactttcttggattagcattaggagtctctacactcttcatccattcatttgatgctgccaatggagctggtttaccaccagaagaaaaaccaaaattatgtgatggaacttgtgagaaagagcttgaaaatgtacctatggtaactactgaatcaggtttgcaatacaaggatattaaagttgggcagggccctagtccaccagttggatttcaggttgctgccaattatgttgcaatggttccatctggacaaatatttgatagttcattggagaaaggccagctttacatttttcgtgttggatctggtcaggtgataaaaggacttgatgaaggtcttttgagcatgaaagtaggagggaaacgtcggctgtacatacctggatcgttggcattcccaaaaggccttaattctgcaccaggaagaccaagggtggctccaaacagtccagtagtatttgatgtaagtttggaatatgtaccgggacttgacgtggatgaggaataa

SEQ ID NO: 284 - protein, 229 aa, Medicago truncatula
MPSMASPLLLPLYSTCGKIPSLTASQSISVEKLRRFALKVKSTETRECTANDIFNTNSRRDFLGLALGVSTLFIHSFDAANGAGLPPEEKPKLCDGTCEKELENVPMVTTESGLQYKDIKVGQGPSPPVGFQVAANYVAMVPSGQIFDSSLEKGQLYIFRVGSGQVIKGLDEGLLSMKVGGKRRLYIPGSLAFPKGLNSAPGRPRVAPNSPVVFDVSLEYVPGLDVDEE

SEQ ID NO: 285 - DNA, 690 bp, Mimulus guttatus
atggcgtcgtcatcagcatctttgctgcttccaatccgttgtacgttcggcaaaagtgattctcccaatcgtcaaaaagtgtacagaatcaacagcggtgttggagtacaatccctagcttcagagcctagactagtagaagcagtaacggcaagagacgagtgtgtttttacgaaccgaagaaacttaatcaacctaggtttgggactcgtaagctttttgagtgtctcgacttttgctgaagcagcgggattgcccccggaggagaaaccgaaactatgcgatgattcgtgcgagaaagagcttgaaaatgtacctatgattactaccgagtcgggtttgcagtacaaggatattaaagtcggtggaggacctagtcctcccgttggatttcaggtggcagcaaattatgttgcgatggttccttctggccaaatatttgatagttcgctggagaaaggtcagatttacattttccgggtgggctctggtcaggtgattaaggggctggatgaagggatcctcagcatgaaagttggagggaaacgccgtatctacgttcctggaccgttagcatttccgaaagggctgacatcagcaccgggaaggccaagagttgctgccaatagtccggtgatctttgatgtgagtttgctgtacattccgggcctcgagtacgatgaggagtaa

SEQ ID NO: 286 - protein, 229 aa, Mimulus guttatus
MASSSASLLLPIRCTFGKSDSPNRQKVYRINSGVGVQSLASEPRLVEAVTARDECVFTNRRNLINLGLGLVSFLSVSTFAEAAGLPPEEKPKLCDDSCEKELENVPMITTESGLQYKDIKVGGGPSPPVGFQVAANYVAMVPSGQIFDSSLEKGQIYIFRVGSGQVIKGLDEGILSMKVGGKRRIYVPGPLAFPKGLTSAPGRPRVAANSPVIFDVSLLYIPGLEYDEE

SEQ ID NO: 287 - DNA, 714 bp, Passiflora edulis
atggccgcagcagccgcttcctcctccgcctcgccgcttcttctcccctcagggccgagatatgcctccagggcgtggcttcgcgacggcaaggcgttcagagcttgcagaacgctgagttcagaagcaccatgctgctgcaaggttgccagtggaagcgcagcgcaatgtggagtagctgacagctgcgtgatcggtagcacccggaggagcatgctcggactggtggctctcggggtgtctacctttgggctggccgggcttgatgctatcgctgccgggttgccgccggaggagaagcccaagctctgcgacgccgcctgcgaaaaggagctcgaaaatgtgcctatggtaactacagaatctggtttgcagtacaaggatatcaaagtgggtgaggggccaagtccacccattggattccaggttgctgcaaattatgttgccatagtaccgaatggacagatattcgacagttccctggagaaaggccggccctacatattccgtgttggttcaggacaggtgataaagggactcgatgaagggattttgacaatgaaggttggaggactacgtcggttgtatatacctggcccattagcatttcctaaggggcttacttcagctcctggaaggccaagagtagctccaagcagccccgtcatatttgatgtcaacttattgtacgtaccaggtcttgatgatgagtga

SEQ ID NO: 288 - protein, 237 aa, Passiflora edulis
MAAAAASSSASPLLLPSGPRYASRAWLRDGKAFRACRTLSSEAPCCCKVASGSAAQCGVADSCVIGSTRRSMLGLVALGVSTFGLAGLDAIAAGLPPEEKPKLCDAACEKELENVPMVTTESGLQYKDIKVGEGPSPPIGFQVAANYVAIVPNGQIFDSSLEKGRPYIFRVGSGQVIKGLDEGILTMKVGGLRRLYIPGPLAFPKGLTSAPGRPRVAPSSPVIFDVNLLYVPGLDDE

SEQ ID NO: 289 - DNA, 663 bp, Physcomitrella patens
atggcgcagtcctgcctgcactccaccgccggagcagctatctggacatttccagcggccaagatggtgtcaacacccagacaagcatcactcgtaagatgttctatgagcaagaaaggagagaagatgcaggctgaaatgccgcgtagagaagctctggcaaccatagccttggggacggctctctcttggctgcccagtggaattgcagatgctgctggtttgcctcctggtcctcctgctcccaagatctgtgacgatacttgtgagaaggagcttgacagtatcccaatggagacaacaccgtcaggtcttcagtacaaagacattgtcgttggaactggggacagtccgcctgttggattccaggtcgcagcaaactacgtggctatgatacccaatggcaagatttttgacagttctctcgagaaaggagtgccatatatctttcgagtaggtgctggtcaggtcgtcaagggcttggacgagggaatcttaaccatgaaagttggaggcaagcgccgattatatatccctggcgagttggcgtttccgaagggactcggtgctgcagcgggtagaccaagagtaccacccagtagcccagtcatcttcgacgtaagcttattgtatattcctggcatttcagacttcgaggaatag

SEQ ID NO: 290 - protein, 220 aa, Physcomitrella patens
MAQSCLHSTAGAAIWTFPAAKMVSTPRQASLVRCSMSKKGEKMQAEMPRREALATIALGTALSWLPSGIADAAGLPPGPPAPKICDDTCEKELDSIPMETTPSGLQYKDIVVGTGDSPPVGFQVAANYVAMIPNGKIFDSSLEKGVPYIFRVGAGQVVKGLDEGILTMKVGGKRRLYIPGELAFPKGLGAAAGRPRVPPSSPVIFDVSLLYIPGISDFEE

SEQ ID NO: 291 - DNA, 783 bp, Picea glauca
atggctgtctctcttacttcactgggtgcaggccaggcttatgcaacaatttctgttcaacttaaagagaggaaattggaacccgcaaaacagtccttggtagtgctgtgccaagaatctgattctcaacatagaagatttattactcaaaaacatcatttgaacattcgcactctaaatcgaagagatgcaatcagattgataggtttagcagctggactatgtaatgatccctctctgatatatgatgctagaggagctggtttacctccacagggaaatgcaaagttgtgtgatacaacatgtgagaaagaacttgaaaatgctccaatggtcacaactgaatctggtctacaatacaaggatatcaagattggggatgggcctagtccacctattggatttcaggttgcagcaaactatgtagcaatggtatcatccggacaagtttttgatagttcgttggataagggtcaaccttacatctttcgagtaggttctggccaggtgatcaagggtctcgatgaaggccttttgagcatgaaagttggtggaaaacgtcgcttgtacattcctgggcctcttgcattcccaaagggccttaactctgctccaggaaggccacgggtagcacctaacagtcctgtcatttttgaccttgcattcccaaagggccttaactctgctccaggaaggccacgggtagcacctagcagccctgtcatttttgacgtaagtttggagtatatacctggccttgaacttgaacttgaagaggagtaa

SEQ ID NO: 292 - protein, 260 aa, Picea glauca
MAVSLTSLGAGQAYATISVQLKERKLEPAKQSLVVLCQESDSQHRRFITQKHHLNIRTLNRRDAIRLIGLAAGLCNDPSLIYDARGAGLPPQGNAKLCDTTCEKELENAPMVTTESGLQYKDIKIGDGPSPPIGFQVAANYVAMVSSGQVFDSSLDKGQPYIFRVGSGQVIKGLDEGLLSMKVGGKRRLYIPGPLAFPKGLNSAPGRPRVAPNSPVIFDLAFPKGLNSAPGRPRVAPSSPVIFDVSLEYIPGLELELEEE

SEQ ID NO: 293 - DNA, 669 bp, Raphanus raphanistrum
agattcttatgtcatcaatcatcatctttctgcaactagagaaaaccaaaagaaactatgggggcctaatggtgaaggagctgacggtttctttttacaacgagatgtaagtaaaaatgagacaccatcacataaaagcaagtaatgttgtatttcatattataatctgaactttaaaaagaaatagtttcactcttcatctgactcgagccctggtatgtactctaagctcacatcaaatacaactggactgttcggtgcaactcttggcctccctggagctgagactagaccctctggaaacgccaaaggccctggaatgtagagtctgcgtttaccaccagctttcatagtcaagagtccttcatctagtcccttgatcacctggccagacccaacacggaacagatatggtagacctttctctagagaactgtcaaaaatctgccctgaaggaaccatagctacatagttagcagcaacctgaaaaccaacagggggactagggcctttaccaactttgatatctttatactgaagccctgactctgcagttaccattgggacattttcaagctctttctcgcattctgcttcacaaagcctcggtttatcctctggtggcaaaccggctgcataagcctcaagagagtagctcgttgagagtcc

SEQ ID NO: 294 - protein, 222 aa, Raphanus raphanistrum
MAASSSPSLLLPLGSSSRNGPTTKTPRCISTRVIIASETRDRSCKTNTLSSRRDAMLLFLGVSGLSTSYSLEAYAAGLPPEDKPRLCEAECEKELENVPMVTAESGLQYKDIKVGKGPSPPVGFQVAANYVAMVPSGQIFDSSLEKGLPYLFRVGSGQVIKGLDEGLLTMKAGGKRRLYIPGPLAFPEGLVSAPGRPRVAPNSPVVFDVSLEYIPGLESDEE

SEQ ID NO: 295 - DNA, 645 bp, Selaginella moellendorffii
atggcgtcgtctccttgcatgccccatccctgtctcgtggctagagcgtcttgcgattcttcttcttgctcttccagcttctcggcgcctctccggcatcgcgctgtgaaatgtagcagcgccagcgccagccggagggaattttctctcggctcatccgcattttctcttctttcgctcgctggatttgccagagccgagagcattcccacggaagctcccaagcaactctgtgacaacgcttgcgaatcggagctcgaaaatgctccaatggtgactactccatccggactacagtacaaggacatcgtcctcggaaatggcccatcaccaccgattggattccaggtcgcagcaaactacgtcgccatgattccttccggacaagtctttgacagctcgctggaaaaaggagcgccttacattttccgtgttggagccggatcagtggtgaaggggctggatgaaggaatttcgaccatgaaagttggtggcaaacgtaggctctacattcccggctctctggcattcccgcgggggctgaatgctgctgctggtaggccgagagttcttccgaacacaccggtggttttcgacgtgagcttagaatacatccctggcttatccgacacagattttgagtga

SEQ ID NO: 296 - protein, 214 aa, Selaginella moellendorffii
MASSPCMPHPCLVARASCDSSSCSSSFSAPLRHRAVKCSSASASRREFSLGSSAFSLLSLAGFARAESIPTEAPKQLCDNACESELENAPMVTTPSGLQYKDIVLGNGPSPPIGFQVAANYVAMIPSGQVFDSSLEKGAPYIFRVGAGSVVKGLDEGISTMKVGGKRRLYIPGSLAFPRGLNAAAGRPRVLPNTPVVFDVSLEYIPGLSDTDFE

SEQ ID NO: 297 - DNA, 699 bp, Trifolium pratense
aataaattataaaataagtaacttttgaaatatacaaaatatccaacacatagctgtaaatttcaagggtactcaaaagaattaacaattgtataagataatgatagtgatggtgataaattaaatttaggttgactgtgtacaatcaaggttgaatcgacaaccaaattttattcctcatcatccacttcaagtcctggtacatattccaaacttacatcaaatactaccggactgtttggagccactcttggtcttcctggagcagaattaagtccttttgggaaggccaatggtccaggtatgtacagccgacgttttcctcctactttcatgctcaaaagaccttcatcaagtccttttatcacctgacccgatccaacacgaaaaatgtaaagctggcctttctccaatgaactatcaaatatttgtccagatggaaccattgcaacataattagcagccacctgaaatccaactggtggactagggccttgcccaactttaatatccttgtattgcaaacctgattcagtagttacaataggtacattttcaagctctttctcacaagtgtcgtcgcataattttggtttttcttctggtggcaaaccagctccattggcagcatcaaatgaatggatgaagagtgtagtagagactcctaatgctaatccaagaaagtctctacgtgactcg

SEQ ID NO: 298 - protein, 232 aa, Trifolium pratense
MPSMASPLHLPLYSTCGKIPSFTAPQAISIRRFVLKVKCSETRECTANANDNAVFNTESRRDFLGLALGVSTTLFIHSFDAANGAGLPPEEKPKLCDDTCEKELENVPIVTTESGLQYKDIKVGQGPSPPVGFQVAANYVAMVPSGQIFDSSLEKGQLYIFRVGSGQVIKGLDEGLLSMKVGGKRRLYIPGPLAFPKGLNSAPGRPRVAPNSPVVFDVSLEYVPGLEVDDEE

SEQ ID NO: 299 - DNA, 708 bp, Tofieldia pusilla
atggcagcatcagcatcttcactacttccccttggttgtattttcagcacaagttataattcttgcaatcgtcgaagagtgtacaaaatcaatgttgtgtctggaatacaatccttagcttccgaaccaagattacaaccattgaagactataaataagcttcgggatgatgaagatcgtggcttaacattcacgaaccgcagaaacttaattaaccttgggttaggaattttaaccctcctgagtggctctaattttgccgaggcagccggattgccacccgaggagaaaccaaggccgtgcaatgatgcgtgcgacaaagagcttgaaaatgtacctatggtaactacagagtctgggttgcaatacaaggatatcaaagttggtagtggacctagtcctccggttggatttcaggtagctgcaaattgtgtagctatggttccttctggccaaatattcgacagttcgttggagaaaggacaagcttacatattccgagttggtgctggtcaggtcatcaaggggttagatgaaggcatcctcagtatgaaagttggagggaaacgccgtctctatattccaggacccttggcatttccgaaaggtctgacatcagctccgggaaagccacgggtggctgcaaatagtccggtcatctttgatgttagtttggagttcattcctggactcgacgacgaggagtga

SEQ ID NO: 300 - protein, 235 aa, Tofieldia pusilla
MAASASSLLPLGCIFSTSYNSCNRRRVYKINVVSGIQSLASEPRLQPLKTINKLRDDEDRGLTFTNRRNLINLGLGILTLLSGSNFAEAAGLPPEEKPRPCNDACDKELENVPMVTTESGLQYKDIKVGSGPSPPVGFQVAANCVAMVPSGQIFDSSLEKGQAYIFRVGAGQVIKGLDEGILSMKVGGKRRLYIPGPLAFPKGLTSAPGKPRVAANSPVIFDVSLEFIPGLDDEE

SEQ ID NO: 301 - protein, 50 aa, Artificial sequence
  motif 1
  VARIANT (26)..(26): Xaa can be Gln or Ser
  VARIANT (32)..(32): Xaa can be Val or Ile
  VARIANT (34)..(34): Xaa can be Phe or Tyr
  VARIANT (46)..(46): Xaa can be Ser or Asn
  VARIANT (49)..(49): Xaa can be Val or Ile
CEKELENVPMVTTESGLQYKDIKVGXGPSPPXGXQVAANYVAMVPXGQXF

SEQ ID NO: 302 - protein, 41 aa, Artificial sequence
  motif 2
  VARIANT (16)..(16): Xaa can be Ser or Ala
  VARIANT (27)..(27): Xaa can be Ile or Leu
  VARIANT (35)..(35): Xaa can be Lys or Leu
  VARIANT (40)..(40): Xaa can be Ile or Val
DSSLEKGQPYIFRVGXGQVIKGLDEGXLSMKVGGXRRLYXP

SEQ ID NO: 303 - protein, 21 aa, Artificial sequence
  motif 3
  VARIANT (10)..(10): Xaa can be Asn or Ser
  VARIANT (14)..(14): Xaa can be Val or Ile
  VARIANT (20)..(20): Xaa can be Glu or Leu
APGRPRVAPXSPVXFDVSLXY

SEQ ID NO: 304 - protein, 41 aa, Artificial sequence
  motif 4
  VARIANT (16)..(16): Xaa can be Ser or Ala
  VARIANT (35)..(35): Xaa can be Lys or Leu
  VARIANT (40)..(40): Xaa can be Ile or Val
DSSLEKGQPYIFRVGXGQVIKGLDEGILSMKVGGXRRLYXP

SEQ ID NO: 305 - protein, 50 aa, Artificial sequence
  motif 5
  VARIANT (2)..(2): Xaa can be Val, Leu or Ala
  VARIANT (7)..(7): Xaa can be Thr or Met
  VARIANT (17)..(17): Xaa can be Lys or Arg
  VARIANT (20)..(20): Xaa can be Glu, Gln or Arg
  VARIANT (26)..(26): Xaa can be Ile or Val
  VARIANT (33)..(33): Xaa can be Asn or Glu
  VARIANT (34)..(34): Xaa can be Cys or Tyr
  VARIANT (35)..(35): Xaa can be Ile or Val
  VARIANT (37)..(37): Xaa can be Met or Ile
  VARIANT (40)..(40): Xaa can be Asn or Thr
NXPMVTXESGLQYKDIXVGXGPSPPXGFQVAAXXXAXVPXGQIFDSSLEK

SEQ ID NO: 306 - protein, 41 aa, Artificial sequence
  motif 6
  VARIANT (2)..(2): Xaa can be Gln or Arg
  VARIANT (10)..(10): Xaa can be Ala or Ser
  VARIANT (23)..(23): Xaa can be Ser or Thr
  VARIANT (37)..(37): Xaa can be Pro or Gln
  VARIANT (38)..(38): Xaa can be Leu or Val
  VARIANT (39)..(39): Xaa can be Ala or Ser
  VARIANT (40)..(40): Xaa can be Phe or Ser
  VARIANT (41)..(41): Xaa can be Pro or Leu
GXPYIFRVGXGQVIKGLDEGILXMKVGGLRRLYIPGXXXXX

SEQ ID NO: 307 - protein, 29 aa, Artificial sequence
  motif 7
  VARIANT (1)..(1): Xaa can be Leu, Gln, Ala or Gly
  VARIANT (2)..(2): Xaa can be Ala or Val
  VARIANT (3)..(3): Xaa can be Ala, Leu, Gly or Phe
  VARIANT (4)..(4): Xaa can be Leu, Phe or Gln
  VARIANT (5)..(5): Xaa can be Asp or Ala
  VARIANT (7)..(7): Xaa can be Val, Leu, Phe or Ile
  VARIANT (9)..(9): Xaa can be Ala or Gly
  VARIANT (23)..(23): Xaa can be Ala or Asp
  VARIANT (26)..(26): Xaa can be Ala, Lys, Thr or Gly
  VARIANT (27)..(27): Xaa can be Glu or Asp
XXXXXAXAXGLPPEEKPKLCDAXCEXXLE

SEQ ID NO: 308 - DNA, 50 bp, Artificial sequence
  primer: prm24406
ggggacaagtttgtacaaaaaagcaggcttaaacaatggctgctgctgcc

SEQ ID NO: 309 - DNA, 52 bp, Artificial sequence
  primer: prm24407
ggggaccactttgtacaagaaagctgggtgatgatgctttcactcatcgtcg

SEQ ID NO: 310 - DNA, 2194 bp, Oryza sativa
aatccgaaaagtttctgcaccgttttcaccccctaactaacaatatagggaacgtgtgctaaatataaaatgagaccttatatatgtagcgctgataactagaactatgcaagaaaaactcatccacctactttagtggcaatcgggctaaataaaaaagagtcgctacactagtttcgttttccttagtaattaagtgggaaaatgaaatcattattgcttagaatatacgttcacatctctgtcatgaagttaaattattcgaggtagccataattgtcatcaaactcttcttgaataaaaaaatctttctagctgaactcaatgggtaaagagagagattttttttaaaaaaatagaatgaagatattctgaacgtattggcaaagatttaaacatataattatataattttatagtttgtgcattcgtcatatcgcacatcattaaggacatgtcttactccatcccaatttttatttagtaattaaagacaattgacttatttttattatttatcttttttcgattagatgcaaggtacttacgcacacactttgtgctcatgtgcatgtgtgagtgcacctcctcaatacacgttcaactagcaacacatctctaatatcactcgcctatttaatacatttaggtagcaatatctgaattcaagcactccaccatcaccagaccacttttaataatatctaaaatacaaaaaataattttacagaatagcatgaaaagtatgaaacgaactatttaggtttttcacatacaaaaaaaaaaagaattttgctcgtgcgcgagcgccaatctcccatattgggcacacaggcaacaacagagtggctgcccacagaacaacccacaaaaaacgatgatctaacggaggacagcaagtccgcaacaaccttttaacagcaggctttgcggccaggagagaggaggagaggcaaagaaaaccaagcatcctccttctcccatctataaattcctccccccttttcccctctctatataggaggcatccaagccaagaagagggagagcaccaaggacacgcgactagcagaagccgagcgaccgccttctcgatccatatcttccggtcgagttcttggtcgatctcttccctcctccacctcctcctcacagggtatgtgcctcccttcggttgttcttggatttattgttctaggttgtgtagtacgggcgttgatgttaggaaaggggatctgtatctgtgatgattcctgttcttggatttgggatagaggggttcttgatgttgcatgttatcggttcggtttgattagtagtatggttttcaatcgtctggagagctctatggaaatgaaatggtttagggatcggaatcttgcgattttgtgagtaccttttgtttgaggtaaaatcagagcaccggtgattttgcttggtgtaataaagtacggttgtttggtcctcgattctggtagtgatgcttctcgatttgacgaagctatcctttgtttattccctattgaacaaaaataatccaactttgaagacggtcccgttgatgagattgaatgattgattcttaagcctgtccaaaatttcgcagctggcttgtttagatacagtagtccccatcacgaaattcatggaaacagttataatcctcaggaacaggggattccctgttcttccgatttgctttagtcccagaattttttttcccaaatatcttaaaaagtcactttctggttcagttcaatgaattgattgctacaaataatgcttttatagcgttatcctagctgtagttcagttaataggtaatacccctatagtttagtcaggagaagaacttatccgatttctgatctccatttttaattatatgaaatgaactgtagcataagcagtattcatttggattattttttttattagctctcaccccttcattattctgagctgaaagtctggcatgaactgtcctcaattttgttttcaaattcacatcgattatctatgcattatcctcttgtatctacctgtagaagtttctttttggttattccttgactgcttgattacagaaagaaatttatgaagctgtaatcgggatagttatactgcttgttcttatgattcatttcctttgtgcagttcttggtgtagcttgccactttcaccagcaaagttc

SEQ ID NO: 311 - DNA, 1008 bp, Triticum aestivum
atggccaccccgacgaccacgccggcgacgatgcgggccgtgcagtacgacgcctgcggcggaggcgccgccggcctcaagcatgtagaagtccccgtcccttcagcaaagaagaatgaggtcctgctgaaactgcaagctgcaaccatcaacccagttgactggaagatacagaaaggggacttgcggcctctgctgcctcgtagactgccttttatcccagtgactgatgttgcaggagtagttgttgatgttggtcctggagtgaaaggtgtcacggtgggtgatcaagtcgtcgccatgttgaactcttttaacggaggtggactggcagagtacgctgtagcatccgcaaacctgaccgtcaaaaggccagctgaggtttctgcagctgagggtgctgggcttcccattgctgcaggcactgcgctccaggcactgaggtccattggtgccaagtttgacggcaccggcaagccattaaacgtgttggtcaccgctgcctctggtggcgtaggcctgtacgcggtgcagcttgcaaagctagcgaaccttcatgttaccgccacctgcggcgcacgcaacatggatcttgtgaagagcttgggcgcagacgaggtgatggactacaggaccccagagggggcgagcctgcagagcccctccggcagaaagtacgacggcgtggttcactgcaccgtcggtgtcagctggtcgtttttccagccattgctcagtgatgccgggagagtgatcgatatcacccccaacttgtcggccatcctcacatctgcgctgcacagggtgacattttccaagaagcgcctggtgcccctgctcctgtcgcccaacaaggcggacctggagttcttggttgggttgctcaaggaaggcaagctgaagacggtgatcgactccaagttcccgttgagcgatgcaggcaaggcgtggcagagcagtatcgatggccatgccactggtaagattgtcgttgagatggagagctga

SEQ ID NO: 312 - protein, 335 aa, Triticum aestivum
MATPTTTPATMRAVQYDACGGGAAGLKHVEVPVPSAKKNEVLLKLQAATINPVDWKIQKGDLRPLLPRRLPFIPVTDVAGVVVDVGPGVKGVTVGDQVVAMLNSFNGGGLAEYAVASANLTVKRPAEVSAAEGAGLPIAAGTALQALRSIGAKFDGTGKPLNVLVTAASGGVGLYAVQLAKLANLHVTATCGARNMDLVKSLGADEVMDYRTPEGASLQSPSGRKYDGVVHCTVGVSWSFFQPLLSDAGRVIDITPNLSAILTSALHRVTFSKKRLVPLLLSPNKADLEFLVGLLKEGKLKTVIDSKFPLSDAGKAWQSSIDGHATGKIVVEMES

SEQ ID NO: 313 - DNA, 990 bp, Arabidopsis lyrata
atggccggaaaactcatgcacgctcttcagtacgactcgtacggtggtggcgccgccgctttaaagcatgttcaagttccggttccaacaccgaagagtaatgaggtttgcctgaaattagaagctactagtttaaaccctgttgattggaaaattcagaaaggaatgattcggccttttctgccccgaaagttcccctgcattcctgctactgatgttgctggagaagtcgttgaggttggatcaggagtcaagaatttcaaggctggtgacaaagttgtagcggttcttagccatctaggtggaggtggacttgctgagttcgctgttgcaagcgagaagctgactgtcaaaagacctcaagaagtgggagcagctgaagcagccgctttacctgtggcgggtctaaccgctctccaagctcttactaatcctgcggggttgaagttggatggtacaggcaagaaggcgaacatcctggtcacagcagcatctggtggggttggtcactatgcagtccagctggcaaaacttgcgaatgctcatgtaaccgctacatgtggtgcccggaatatagactttgtcaaatcgttgggagcggatgaggttctcgactacaagactccggagggagctaccctcaagagtccgtcaggtaagaaatatgacgctgtggtccattgtgcaaacgggattccattttcaacatttgaaccaaatctgtcggaaaacgggaaggtgatagatatcacaccggggcctagtgccatgtggacttatgcggttaagaaagtaaccatgtcaaagaagcaattggtgccgctcttgttgatcccaaaagctgagaatttggagtttatggtcaatctattgaaagaaggaaaagtgaagactgtgattgactcgaagcaccctctgagcaaagcggaagatgcttgggccaaaagtatcgatggtcatgctactgggaagatcattgtcgagccataa

SEQ ID NO: 314 - protein, 329 aa, Arabidopsis lyrata
MAGKLMHALQYDSYGGGAAALKHVQVPVPTPKSNEVCLKLEATSLNPVDWKIQKGMIRPFLPRKFPCIPATDVAGEVVEVGSGVKNFKAGDKVVAVLSHLGGGGLAEFAVASEKLTVKRPQEVGAAEAAALPVAGLTALQALTNPAGLKLDGTGKKANILVTAASGGVGHYAVQLAKLANAHVTATCGARNIDFVKSLGADEVLDYKTPEGATLKSPSGKKYDAVVHCANGIPFSTFEPNLSENGKVIDITPGPSAMWTYAVKKVTMSKKQLVPLLLIPKAENLEFMVNLLKEGKVKTVIDSKHPLSKAEDAWAKSIDGHATGKIIVEP

SEQ ID NO: 315 - DNA, 990 bp, Arabidopsis thaliana
atggctggaaaactcatgcacgctcttcagtacaactcttacggtggtggcgccgccggattagagcatgttcaagttccggttccaacaccaaagagtaatgaggtttgcctgaaattagaagctactagtctaaaccctgttgattggaaaattcagaaaggaatgatccgcccatttctgccccgcaagttcccctgcattccagctactgatgttgctggagaggtcgttgaggttggatcaggagtaaaaaattttaaggctggtgacaaagttgtagcggttcttagccatctaggtggaggtggacttgctgagttcgctgttgcaaccgagaagctgactgtcaaaagacctcaagaagtgggagcagctgaagcagcagctttacctgtggcgggtctaaccgctctccaagctcttactaatcctgcggggttgaagctggatggtacaggcaagaaggcgaacatcctggtcacagcagcatctggtggggttggtcactatgcagtccagctggcaaaacttgcaaatgctcacgtaaccgctacatgtggtgcccggaacatagagtttgtcaaatcgttgggagcggatgaggttctcgactacaagactcccgagggagccgccctcaagagtccgtcgggtaaaaaatatgacgctgtggtccattgtgcaaacgggattccattttcggtattcgaaccaaatttgtcggaaaacgggaaggtgatagacatcacaccggggcctaatgcaatgtggacttatgcggttaagaaaataaccatgtcaaagaagcagttagtgccactcttgttgatcccaaaagctgagaatttggagtttatggtgaatctagtgaaagaagggaaagtgaagacagtgattgactcaaagcatcctttgagcaaagcggaggatgcttgggccaaaagtatcgatggtcatgctactgggaagatcattgtcgagccataa

SEQ ID NO: 316 - protein, 329 aa, Arabidopsis thaliana
MAGKLMHALQYNSYGGGAAGLEHVQVPVPTPKSNEVCLKLEATSLNPVDWKIQKGMIRPFLPRKFPCIPATDVAGEVVEVGSGVKNFKAGDKVVAVLSHLGGGGLAEFAVATEKLTVKRPQEVGAAEAAALPVAGLTALQALTNPAGLKLDGTGKKANILVTAASGGVGHYAVQLAKLANAHVTATCGARNIEFVKSLGADEVLDYKTPEGAALKSPSGKKYDAVVHCANGIPFSVFEPNLSENGKVIDITPGPNAMWTYAVKKITMSKKQLVPLLLIPKAENLEFMVNLVKEGKVKTVIDSKHPLSKAEDAWAKSIDGHATGKIIVEP

SEQ ID NO: 317 - DNA, 990 bp, Aquilegia sp.
atggccggaaaagttatgcaagctattcgttttgaaggttatggaggccgtgttgctgacttgaagcatgcggaggtgcctgttccgggtccaaagaaagatgaggtcttacttaagctggaagcaacaagtcttaatccagttgattggaaaattatgaaaggcgtgctgcgacctattctgccacgcaaattcccttacatacctggtaccgatgtagcaggagaggtggtggaggttggtccaggtgtcaagagtgttggtgttggtgacaaagttgtagcgatgcttagccatgctactggaggtggacttgcagaatttgccgtggctcaggaaagcttaaccgtaaagaggcctccagaagtatcagcagctgaaggggctgcattacctgttgctggtctaacagcacaccaggctcttacaaagtctgctggtatcaagcttgatggtagcggcaaaacaacaaatgttctaatcacagctgcctcaggtggagtgggtcactatgctgttcaattggcaaaacttggaaacacgcatgttacagctacttgtggggcaaggaatattgactttgtgaagagtttaggggcggatgaggttcttgactataagaccccagatggagttgctctgaatagcccttctggtaagaaatatgatgcggtaatccattgtgcaacgggtattccttggtcgacttttgagcctaatttgagtgagcgtgggaaagtgatagatataactcctaatgctactgcaatgctgacatttgcattgaagaagctgactctctctaagaagcagctggtgccattgcttatgatccccaagcgtgagaatctggagtatttggttgggttggtaaaggaagggaagctcaagacagttgtagattccaagcatccactgagcaatgctgaagatgcatggtccaagagcatagatggccatgccacagggaagataatagtagaaccatag

SEQ ID NO: 318 - protein, 329 aa, Aquilegia sp.
MAGKVMQAIRFEGYGGRVADLKHAEVPVPGPKKDEVLLKLEATSLNPVDWKIMKGVLRPILPRKFPYIPGTDVAGEVVEVGPGVKSVGVGDKVVAMLSHATGGGLAEFAVAQESLTVKRPPEVSAAEGAALPVAGLTAHQALTKSAGIKLDGSGKTTNVLITAASGGVGHYAVQLAKLGNTHVTATCGARNIDFVKSLGADEVLDYKTPDGVALNSPSGKKYDAVIHCATGIPWSTFEPNLSERGKVIDITPNATAMLTFALKKLTLSKKQLVPLLMIPKRENLEYLVGLVKEGKLKTVVDSKHPLSNAEDAWSKSIDGHATGKIIVEP

SEQ ID NO: 319 - DNA, 990 bp, Brassica napus
atggccgaaaaactcatgcacgctcttcaatacgagtcttacggcggtggcgccgccgctttgaagcatgttcaagttccggttccatcgcctaaggccaacgaggttttgctgaaattagaagctactagtctaaaccctgttgattggaaaattcaaaaaggaatgattaggccttttctgcctcgcaagttcccctgcattcctgctacggatgttgctggtgaggtcttagaggttggatcaggagtcaagaacttcaaggctggtgacaaagttgtatcagttctcagccatcttaccggaggaggacttgctgaatatgctgttgcaagcgagaaactgacagtcaaaaggcctcaagaggtaggaccagctgaagcagccgctttacctgtggccggcctaaccgctctccaggctctaactaatccggcaggattgaagctggatggtacaggcaagcaggcgaacatcctggtcacggcagcatctggtggtgtcggccactatgcagtccagctagcaaagctagggaacgctcatgtaaccgccacatgtggggctcggaacatagacttcgttaaatcattaggagcggacgaggttcttgactacaagactccagagggagctgctctcaagagtccctctggtaagaaatatgactctgtgattcactgcgcaaatgggataccgttttcgacattcgaaccgaatttgtctgaaaatggaaaggttatagacatcacgccggggcctagcgcaatgtggactttcgccgttaagaaaataaccatgtctaagaagcaattggttccgcttttgttgatcccgaaagctgagaatttggaatttatggtcaacttagtgaaagaagggaaagtcaagactgtgattgactcgaagcatcctctgagcaaagcagaggatgcttgggctaaaagtatcgacggtcatgctactgggaagatcattatcgagccatga

SEQ ID NO: 320 - protein, 329 aa, Brassica napus
MAEKLMHALQYESYGGGAAALKHVQVPVPSPKANEVLLKLEATSLNPVDWKIQKGMIRPFLPRKFPCIPATDVAGEVLEVGSGVKNFKAGDKVVSVLSHLTGGGLAEYAVASEKLTVKRPQEVGPAEAAALPVAGLTALQALTNPAGLKLDGTGKQANILVTAASGGVGHYAVQLAKLGNAHVTATCGARNIDFVKSLGADEVLDYKTPEGAALKSPSGKKYDSVIHCANGIPFSTFEPNLSENGKVIDITPGPSAMWTFAVKKITMSKKQLVPLLLIPKAENLEFMVNLVKEGKVKTVIDSKHPLSKAEDAWAKSIDGHATGKIIIEP

SEQ ID NO: 321 - DNA, 990 bp, Capsicum annuum
atggctgcaaaggttatgcatgctgttcaatacgactcttatggtgtcggagccgctggcttgaagcatgtggaagttcctgtgcctactccgaataagaacgaggtcttgctaaaagtggaggctacaagcataaatcctgttgactggaaaattcagaagggcatgcttcgtccacttcttccttccaagtttccttttattcctactaccgatgtaggaggagaggttgtagaggtaggagctaatgtaaaaagtttcaaggcaggtgacaaggttgtggccatgctcaatacccggaatggaggtggattggctgaatatgcggtggctaaggagagtatgaccgttacaagacccaccgaagtatcagctgcagaaggtgcaggtcttcttgttgcaggtcttacagctcttcaggcccttgtcaatcctgctggggtcaagctcgatggaactggacctcggaagaacattctagttacggctgcctccggtggtgttggtcactatgctgttcaattggcaaaacttggtaacacccatgttactgctacctgtggagcccgcaactttgattttgtgaagagcttaggagcagatgaggttcttgattacaagaccccagagggagcagcacttaagagtccatcaggccaaaaatatgatgcagtggttcactgcacaacagggatcccttggtctacctttgagcctaatttaagtgcgagtgcaaaggtcatcgatctaactcctggagctggcgccatgtggacctttgctgtaaagaaattaactttttcaaagaagcagttggtacctttcctttatactcccaataaggagaacctggaattgcttgttaggcttgtgaaggaagggaaacttaaaacagtgatcgactccaaacatcctctcagcaaggctgaagatgcttggagcaggagtattgatggacatgcgacaggaaagatctttgtggagccatag

SEQ ID NO: 322 - protein, 329 aa, Capsicum annuum
MAAKVMHAVQYDSYGVGAAGLKHVEVPVPTPNKNEVLLKVEATSINPVDWKIQKGMLRPLLPSKFPFIPTTDVGGEVVEVGANVKSFKAGDKVVAMLNTRNGGGLAEYAVAKESMTVTRPTEVSAAEGAGLLVAGLTALQALVNPAGVKLDGTGPRKNILVTAASGGVGHYAVQLAKLGNTHVTATCGARNFDFVKSLGADEVLDYKTPEGAALKSPSGQKYDAVVHCTTGIPWSTFEPNLSASAKVIDLTPGAGAMWTFAVKKLTFSKKQLVPFLYTPNKENLELLVRLVKEGKLKTVIDSKHPLSKAEDAWSRSIDGHATGKIFVEP

SEQ ID NO: 323 - DNA, 999 bp, Citrus sinensis
atggcaggaaagcctcttatgcacgcggttcagtataattcttatggtggaggagctgctgatttgaagcatgttgaactgccggttcctaccccaagcaaagatgaggttttgcttaaacttgaagcaactgctctaaatccggttgactggaaaatccagaagggccagttacgcccttttttgcctcgcaagtttccttgcatacctgcaactgatgtagcaggagaggtcgtaggggtaggatcagaagttaaaattttcaaagctggtgacaaagttgtagcttttcttaactacctcgtaactaatggaggtggactagctgagtttgctgtggctaaggagagctcgacagttgctaggccatcagaggtttcagcagctgaaggttctggcttgcctgttgctggtctcactgctcaccaggcccttactcaatctgcaggtgtcaagcttgatggaagtgggcaacagaaaaacattctagtaactgctgcctcagggggtgtaggtcactatgctgttcagttggcgaagcttggaaacacgcacgtgactgcctcttgtggggctcgcaacattgaatttgtcaagagtttaggggctgatgaggttcttgattacaagacacctgacggggcagctctaaagagtccatctggtcgaaaatacgatgcagtgatccactgtgcaacagggattccctggtctacttttgagcctaatctgggcacaaatgggaaggtgatagatatcactcctggccctagtgcgatgctgacttttgctttgaagaaacttaccttctccaaaaagcagctggtaccactgctgctgattcccaagcgtgagaacctagattttctagttaagttggtgaaggaaggaaagcttaagacagtaatcaactcaaagcatcccctgagcaaggcagaagatgcttgggctgagagtattgatggccatgctacagggaagatcattgtggagccataa

SEQ ID NO: 324 - protein, 332 aa, Citrus sinensis
MAGKPLMHAVQYNSYGGGAADLKHVELPVPTPSKDEVLLKLEATALNPVDWKIQKGQLRPFLPRKFPCIPATDVAGEVVGVGSEVKIFKAGDKVVAFLNYLVTNGGGLAEFAVAKESSTVARPSEVSAAEGSGLPVAGLTAHQALTQSAGVKLDGSGQQKNILVTAASGGVGHYAVQLAKLGNTHVTASCGARNIEFVKSLGADEVLDYKTPDGAALKSPSGRKYDAVIHCATGIPWSTFEPNLGTNGKVIDITPGPSAMLTFALKKLTFSKKQLVPLLLIPKRENLDFLVKLVKEGKLKTVINSKHPLSKAEDAWAESIDGHATGKIIVEP

SEQ ID NO: 325 - DNA, 1011 bp, Festuca arundinacea
atggcgaccaccggaacgacgccgccggccaagatgcgggctctgcagtacgactcctgcggcgaaggcgccgccggcctcaagcatgtggaagttcccgtcccgacagcaaagaagaatgaggtactgttgaaactgcaagcagcaaccgtcaatccagttgactggaagatacagaaaggggacatgcggcctctgctacctcgtagattgccctttatcccagtgaccgatgtcgcaggagaagttgttgatgttggtcctggagtgaaagatctcgcagcaggagatcaagttgttgccatgttaaactctcttaatggaggtggactagctgagtacgttgtagcacccgcaaacatgactgtcaaaaggccatctgcggtatctgcagctgagggtgctggcattcccattgctgctggcagtgcgctcaagtcactgagatccattggtgccaagtttgatggcaccagcaagcctttaaacgtgttgatcaccgccgcctcgggtggcgttggcttgtacgctgtgcagcttgcgaagctggcgaacctccacgtcacggccacctgcggcgccgggaacatggatcttgtgaggagcttgggcgcagacgaggtgatggactacaagaccccagagggtgctagcctgcagagcccctccggcaagaagtacgatggcgtggttcactgcaccgtcggcgtcagctggtcgacgttcaggccattgctgagcagccgcgggagagtgatcgacttaacccctaacttatctgccatcctcgcctctggcctccacaaggtcacattcgcaaagaagcgcgttgtgcccctctttctgcggctcaacaaggcagacctggagttcttggtcgggttgctggaggagggcaagctgaagacggtgatcgactcgaggttcccgctgagcgaggcgagcaaggcatggcagaccagcatcgatggccaccccactggcaagatcgtcgttgagatggagagctga

SEQ ID NO: 326 - protein, 336 aa, Festuca arundinacea
MATTGTTPPAKMRALQYDSCGEGAAGLKHVEVPVPTAKKNEVLLKLQAATVNPVDWKIQKGDMRPLLPRRLPFIPVTDVAGEVVDVGPGVKDLAAGDQVVAMLNSLNGGGLAEYVVAPANMTVKRPSAVSAAEGAGIPIAAGSALKSLRSIGAKFDGTSKPLNVLITAASGGVGLYAVQLAKLANLHVTATCGAGNMDLVRSLGADEVMDYKTPEGASLQSPSGKKYDGVVHCTVGVSWSTFRPLLSSRGRVIDLTPNLSAILASGLHKVTFAKKRVVPLFLRLNKADLEFLVGLLEEGKLKTVIDSRFPLSEASKAWQTSIDGHPTGKIVVEMES

SEQ ID NO: 327 - DNA, 999 bp, Fragaria vesca
atggcagccatggcggcgaaactcatgcatgcggttcagtacgacgcttatggcggaggaccttctggtctcaagcatgttgaggttccaatcccaactccgaagaaagatgaggttttgctgaaattggaagccgctagcataaacccagttgattggaaaattcagaaaggcgtagcgcgccctcttttcccacgcaaatttccttatatacctgttactgatgtggccggagaggttgtggaggttggacaaggagttcagaagttcaaagcaggcgacaaagttgtggcatatctccaccttgttaatggaggtggatttgctgaatttgcaactgctagtgagagtttgacggttgctaggccgcctgaagtttcagcagctgaagctgcaggattacctgttgctggtctcacagctcaccaatgtctcacccaagcagcaggagtcaagcttgacggcactggcccgcaaaagaacatattggttactgctgcttctggtggtgtgggtcagtatgcagtccaacttgcaaaactggggaacactcatgtcacagctacttgtggatctcgtaacattgattttgtaaagagcttaggagctgatgaggttcttgactacaagacccctgaaggggcagctttgaagagcccatctggtcgcaagtatgatgctgttatccactgtgcaaccggcattccttggtgcacttttgagccgaatttgagtccaaatgggaaggttatagacattactccgggtccaactgctttgctcacttctgctctaaagaaactcaccttctccaagaagaagctggtgccgctactcatgaatgccaaggcagagaatctggattatcttgtgaaattggtgaaggaaggaaagctgaggacagtgatcgactccaaatatcctctgagcaaggctgaagaagcttgggctaagagtattgaaggccatgctacggggaagatcattgtggagccttaa

SEQ ID NO: 328 - protein, 332 aa, Fragaria vesca
MAAMAAKLMHAVQYDAYGGGPSGLKHVEVPIPTPKKDEVLLKLEAASINPVDWKIQKGVARPLFPRKFPYIPVTDVAGEVVEVGQGVQKFKAGDKVVAYLHLVNGGGFAEFATASESLTVARPPEVSAAEAAGLPVAGLTAHQCLTQAAGVKLDGTGPQKNILVTAASGGVGQYAVQLAKLGNTHVTATCGSRNIDFVKSLGADEVLDYKTPEGAALKSPSGRKYDAVIHCATGIPWCTFEPNLSPNGKVIDITPGPTALLTSALKKLTFSKKKLVPLLMNAKAENLDYLVKLVKEGKLRTVIDSKYPLSKAEEAWAKSIEGHATGKIIVEP

SEQ ID NO: 329 - DNA, 969 bp, Gossypium barbadense
atgcgcgctgttcagtacagtaaatatggcggaggagtcgccgatctcaagcatgttgaagttccggttcccagtccaaaaaaggatgaagttttgatcaaagtagagacagctagtattaacccaatcgactggaaactacaggatggggtagctcggccatttttacctcggaaattcccccacattcctggtaccgatgtagcaggagaagtcgtacaagttggatcagaagtccagagtttcaaagttggggagaacgttgttgccgtacttggtaatggaggtgcactagctgaatatgctgtggctaatgaaggttccacagtttcaaggcctccagaggtatcagcccgtgaagctgcagctttgccaattgctggcctcgcagctcaccagtcactcacccagcttgctgggatcaaactcgatggaaccggcccagaagtgaatgtattggttaccgctgcttcagggggtgtaggtcaatatgccgttcaactcctaaagctcgcaaatgcacacattacagccacttgtggggctcgtaacatagatttaatcaggagcctgggggctgatgagggtcttgactacaaaactcctgatggggtggctctcaagagcccttctggtcgaacatacgatgtaatcatccactgtgcacacaaaattccttggtctacctttgaggctaacttgacttcaaaagggaaggtagtagatccccctcctggtttcggcactttgatgagtgttgctttcaaaaagataccattcgcaaagaggcaactcatacccttgtttccctcccctaagaaagagacccttgaatttcttgttaagttggtgaaagaaggaaagcttaacccggtaattgattcagtacatcctctaagtaaggctgaagaggcttgggcgaagagcattgacggccatgccactggcaagattcttgtggagccatag

SEQ ID NO: 330 - protein, 322 aa, Gossypium barbadense
MRAVQYSKYGGGVADLKHVEVPVPSPKKDEVLIKVETASINPIDWKLQDGVARPFLPRKFPHIPGTDVAGEVVQVGSEVQSFKVGENVVAVLGNGGALAEYAVANEGSTVSRPPEVSAREAAALPIAGLAAHQSLTQLAGIKLDGTGPEVNVLVTAASGGVGQYAVQLLKLANAHITATCGARNIDLIRSLGADEGLDYKTPDGVALKSPSGRTYDVIIHCAHKIPWSTFEANLTSKGKVVDPPPGFGTLMSVAFKKIPFAKRQLIPLFPSPKKETLEFLVKLVKEGKLNPVIDSVHPLSKAEEAWAKSIDGHATGKILVEP

SEQ ID NO: 331 - DNA, 969 bp, Gossypium hirsutum
atgcgcgctgttcagtacagtaaatatggcggaggagtcgccgatctcaagcatgttgaagttccggttcccagtccaaaaaaggatgaagttttgatcaaagtagagacagctagtattaacccaatcgactggaaactacaggatggggtagctcggccatttttacctcggaaattcccccacattcctggtaccgatgtagcaggagaagtcgtacaagttggatcagaagtccagagtttcaaagttggggagaacgttgttgccgtacttggtaatggaggtgcactagctgaatatgctgtggctaatgaaggttccacagtttcaaggcctccagaggtatcagcccgtgaagctgcagctttgccaattgctggcctcgcagctcaccagtcactcacccagcttgctgggatcaaactcgatggaaccggcccagaagtgaatgtattggttaccgctgcttcaggtggtgtaggtcaatatgccgttcaactcctaaagctcgctaatgcacacattacagccacttgtggggctcgtaacatagatttagtcaggagcctgggggctgatgaggttcttgactacaaaactcctgatggggtggctctcaagagcccttctggtcgaaaatacgatgtaatcatccactgtgcacacaacattccttggtctacctttgaggctaacttgacttcaaaagggaaggtagtagataccactcctggtttcggcactttgatgagtgttgctttcaaaaagataacattcgcaaagaggcaactcataccattgtttacctcacctaagaaagagaaccttgaatttcttgttaagttggtgaaagaaggaaagcttaagccagtaattgattcagtacatcctctaagtaaggctgaagaggcttgggcgaaaagcattgacggccatgccactgggcagattcttgtggagccatag

SEQ ID NO: 332 - protein, 322 aa, Gossypium hirsutum
MRAVQYSKYGGGVADLKHVEVPVPSPKKDEVLIKVETASINPIDWKLQDGVARPFLPRKFPHIPGTDVAGEVVQVGSEVQSFKVGENVVAVLGNGGALAEYAVANEGSTVSRPPEVSAREAAALPIAGLAAHQSLTQLAGIKLDGTGPEVNVLVTAASGGVGQYAVQLLKLANAHITATCGARNIDLVRSLGADEVLDYKTPDGVALKSPSGRKYDVIIHCAHNIPWSTFEANLTSKGKVVDTTPGFGTLMSVAFKKITFAKRQLIPLFTSPKKENLEFLVKLVKEGKLKPVIDSVHPLSKAEEAWAKSIDGHATGQILVEP

SEQ ID NO: 333 - DNA, 990 bp, Gossypium hirsutum
atggctgaaaatctcatgcatgctttacaatataacagctacggcggaggcgctgctggtttgaagcatgttgaagttccgatccccactccaaataaaggtgaaattttgcttaaactggaggcaactagtctaaacccagttgactggaaaatacagaaagggatgctgcgcccatttttacctagaaaattcccctacatacctgcttctgatgtagcgggagaagttgtaaaagttggaccgggagtcacaaattacaaagctggggataaagttgtgtctatgctccatcattttactggaggtggactagctgaatatgctgtggctaaggagaatctgaccgttgcaaggccaccagaagtatcagctgccgaaggtgcaggtttgcctgttgctggtcttacagctcaccaggcactcacccagtcggctggggtcaagcttgatgtaagtggccagcaagtaaacctcttgattactgctgcttcaggtggtgtaggtcaatatgcagttcaactagcaaagcttggaaacacccatgtgacagccacttgtggggctcgcaatctggattttgtcaaaagcctcggagcagatgaggttcttgactacaaaactcccgacggtgcagctctaaaaagcccttcgggtcgcaaatatgatgcagtgatccactgtgcaatgggcattccttggtctacctttgaacctaatctaagttcaaacgggaaggtaatcgatataaccccaggtcctagtgctctgctaacttttgctatgaaaaagcttaccttctcaaagaagaacctggtaccactgctattgtcacctaagaaggagaacctcgaatatctaattaacttagtgaaagataagaagcttaagacggtaattgattcaaagcatcccttaagtaaggctgaagaagcatgggctaagagcattgatggccatgccactggtaagatcattgtggagccttaa

SEQ ID NO: 334 - protein, 329 aa, Gossypium hirsutum
MAENLMHALQYNSYGGGAAGLKHVEVPIPTPNKGEILLKLEATSLNPVDWKIQKGMLRPFLPRKFPYIPASDVAGEVVKVGPGVTNYKAGDKVVSMLHHFTGGGLAEYAVAKENLTVARPPEVSAAEGAGLPVAGLTAHQALTQSAGVKLDVSGQQVNLLITAASGGVGQYAVQLAKLGNTHVTATCGARNLDFVKSLGADEVLDYKTPDGAALKSPSGRKYDAVIHCAMGIPWSTFEPNLSSNGKVIDITPGPSALLTFAMKKLTFSKKNLVPLLLSPKKENLEYLINLVKDKKLKTVIDSKHPLSKAEEAWAKSIDGHATGKIIVEP

SEQ ID NO: 335 - DNA, 987 bp, Gossypium hirsutum
atggctgaaaatcttatgcatgctttacaatataacagctatggcggaggcgctgctgctttgaagcatgttgaagttccgatccccactccaaataaaggtgaaattttgcttaagctggaggcaactagtctaaacccaattgactggaaaatacagaaagggattctgcgcccacttttacctagaaaattcccccacatacctgcaagtgatgtagccggagaagtcgtaaaggttggaccaggagtcacaaattacaaagttggggataaagttgtatctcttcttgatcatttgactggtggactagctgaatatgctgtggctacggagaatctgacagttgcaaggccaccagaaatatcagttgccgaagctgctggtttacccatggctggtctcacagctcaccgagcagtcacccatggggctggggtcaagcttgacggaagtggccagcaattaaacctcttgattactgctgcttcaggtggtgtaggtcattacgcagttcaactagcaaagcttggaaacacacatgtaacagccacttgtggggctcgtaatctggattttgtcaaaagcctcggagcagacgaggttcttgactacaaaactcccgacggtgcagctctgaaaagcccttctggtcgcaaatacgatgtagtgatccactgtgcttctggtattccttggtctacctttgaacctaatctaagttcaaacgggaaggtaatcgacataacccctggtcttagtgctttcctaacttgtgctataaaaaagcttaccttctcaaagaagaagctggtaccactctttatgtcacctaaaaaggagaacctcgattatctggttaacttattgaaagacgggaagcttaagacggtaatcgattcaaagtatcccctaagtaaggctgaggaagcatgggctaagagcattgatggtcatgccactggtaagatcattgtggagccttaa

SEQ ID NO: 336 - protein, 328 aa, Gossypium hirsutum
MAENLMHALQYNSYGGGAAALKHVEVPIPTPNKGEILLKLEATSLNPIDWKIQKGILRPLLPRKFPHIPASDVAGEVVKVGPGVTNYKVGDKVVSLLDHLTGGLAEYAVATENLTVARPPEISVAEAAGLPMAGLTAHRAVTHGAGVKLDGSGQQLNLLITAASGGVGHYAVQLAKLGNTHVTATCGARNLDFVKSLGADEVLDYKTPDGAALKSPSGRKYDVVIHCASGIPWSTFEPNLSSNGKVIDITPGLSAFLTCAIKKLTFSKKKLVPLFMSPKKENLDYLVNLLKDGKLKTVIDSKYPLSKAEEAWAKSIDGHATGKIIVEP

SEQ ID NO: 337 - DNA, 990 bp, Gossypium hirsutum
atggctgaaactcttatgcatgctttacaatatgacagctatggcggaggcgctgctgctttgaagcatgttgaagttccaatacccactccaaataaagatgaaatgttgcttaaactggacgcaattagtctaaacccagttgactggaaaatacaggaaggggtgcttcgcccatttttacctagaaaattcccctgcatacctgctagtgatgtagcaggagaagtcgtaaaggttggaccaggagttacaaatttcaaagctggggataaagttgtagctgcgcttcatcattttaccggaggtggactagctgaatatgctgtggctaaggagaatctgacagttgcaaggtcaccagaagtatcagctgccgaaggtgcaggtttgcctgttgctggtctcacagctcaccaggcactcacccaggcagctggggtcaagcttgacggaagtggccagcaagtaaacctcttgattactgctgcttcaggtggtgtaggtcattacgcagttcaactagccaagcttggaaacacacatgtaacagccacttgtggggctcgtaatctggattttgtcaaaagccttggagcagacgaggttcttgactacaagactcccgacggggcggctctaaaaagcccttcgggtcgcaaatatgatgcagtgatcccctgtgcagcgggcattccttggtttccctttgaacctaatttaagttcaaatgggaaggtaatcgatataacccctggtcctagtgctttcctaacttttgctatgaaaaagcttactttttcaaagaagaagctggaacccctttttgtatcccttaagaaggagacccccaattatttcgttaacttggtgaaagacgggaagcttaagacggtaatcgattcaaagtatcccttaagtaaggctgaagaagcatgggctaagagcattgatggtcatgcccctggtaagatcattggggagccttag

SEQ ID NO: 338 - protein, 329 aa, Gossypium hirsutum
MAETLMHALQYDSYGGGAAALKHVEVPIPTPNKDEMLLKLDAISLNPVDWKIQEGVLRPFLPRKFPCIPASDVAGEVVKVGPGVTNFKAGDKVVAALHHFTGGGLAEYAVAKENLTVARSPEVSAAEGAGLPVAGLTAHQALTQAAGVKLDGSGQQVNLLITAASGGVGHYAVQLAKLGNTHVTATCGARNLDFVKSLGADEVLDYKTPDGAALKSPSGRKYDAVIPCAAGIPWFPFEPNLSSNGKVIDITPGPSAFLTFAMKKLTFSKKKLEPLFVSLKKETPNYFVNLVKDGKLKTVIDSKYPLSKAEEAWAKSIDGHAPGKIIGEP

SEQ ID NO: 339 - DNA, 990 bp, Glycine max
atggggaagaagctcatgcatgcggttcagtacgatagctacggtggaggacctgctggattaaagcatgttgaagttcccttacctactcccagcaaagatgaggttttgattaaggttgaagcagctggtctaaatccatttgattggaaagtacagaaacgcatgttgtggccactttttccttgcaagttcccatatatacctggcactgatatagttggagaggtcatggaggttggtcaaggtgtccgaaagttcaaacctggtgacaaagttgtagcctttgttaacccctttagtggtggaggactagctgagtttgctgttgctaaggagagcatcactgcatcaagaccatcagaatcctcagcatctgaatgtgctggcttacctgtagcaggtctgacagctcttcaagcactcaccaaatccatagggatcaaacttgatgggagtggtgaacggaaaaacattttggtcactgctgcatcaggtggtgtaggacactacgcagtccaactggcaaagctgggaaacactcatgtgacagcaacgtgtggagctcgcaacattgaattggtgaaaagtttaggggctgatgaggtaattgactacaagaccccagatggtgctgctttgaagagtccatctggcaagaaatatgatgctgtgattcactgtgtagtgggttttccgtggtccacctttgagcctaacttgaccatgaatggaaaggttgtagacataagtccaagctctgcttcaatgctgacatttgctctgaagaaacttaccttctccaaaaagcaacttgtgcctctgcttttaattcctaagggtgaggaccttcagtatcttattgatttagtcaaggaaggaaagcttaaaacagttgtagactccaaatatcctttaaccaaggctgaagatgcctgggctaagagtattgatggtcatgcaactgggaagataattattgagttctag

SEQ ID NO: 340 - protein, 329 aa, Glycine max
MGKKLMHAVQYDSYGGGPAGLKHVEVPLPTPSKDEVLIKVEAAGLNPFDWKVQKRMLWPLFPCKFPYIPGTDIVGEVMEVGQGVRKFKPGDKVVAFVNPFSGGGLAEFAVAKESITASRPSESSASECAGLPVAGLTALQALTKSIGIKLDGSGERKNILVTAASGGVGHYAVQLAKLGNTHVTATCGARNIELVKSLGADEVIDYKTPDGAALKSPSGKKYDAVIHCVVGFPWSTFEPNLTMNGKVVDISPSSASMLTFALKKLTFSKKQLVPLLLIPKGEDLQYLIDLVKEGKLKTVVDSKYPLTKAEDAWAKSIDGHATGKIIIEF

SEQ ID NO: 341 - DNA, 990 bp, Glycine max
atggggaagaaactcatgcatgcggttcagtatgatagctacggtggaggacctgctggcttaaagcatgttgaagttcccatacctactcccagcaaagatgaggttttgattaaggttgaagcagctagtataaatccatttgattggaaagtacagaaacgcatgttgtggccacttttgcctcgcaagttcccacatatacctggcactgatataactggagaggtcacagaggttggtcaaggtgtccaaaagttcaaacctggtgacaaagtggtagccattgttaacccatttaatggcggaggactggctgagtttgcggttgctaaggagagtgtcactgcatcaagaccatcagaaacctcagcatctgaatgtgctgccctacctgtagcaggtctgacagctcttcaagctctcaccaaatccatagggataaaacttgatgggagtggtgaaaggaaaagcattttggtcactgccgcatcaggtggtgttggtcactatgctgtccaactggcaaagctaggaaacactcatgtgacagcaacatgtggagctcgcaatattgaattggtgaaaagtttaggggctgatgaggtaattgactataagaccccagatggcgctgctttgaagagtccatctggtaagaaatatgatgctgtgattcactgtgcaatgggctttccatggtccacctttgagcctaacttgaccgtgactggaaaggttgtagacataactccaagctctgcttcaatgctgacatttgctctgaaaaaacttaccttctccaaaaagcaacttgtgcctttgcttttatttcctaaaggtgaggaccttcaacatcttattcatttagtcaaggaaggaaagcttaaaacagttgtggactccaaatatcctctaaccaaggctgaagatgcctgggctaagagtattactggccatgcaactgggaagataattattgagttctag

SEQ ID NO: 342 - protein, 329 aa, Glycine max
MGKKLMHAVQYDSYGGGPAGLKHVEVPIPTPSKDEVLIKVEAASINPFDWKVQKRMLWPLLPRKFPHIPGTDITGEVTEVGQGVQKFKPGDKVVAIVNPFNGGGLAEFAVAKESVTASRPSETSASECAALPVAGLTALQALTKSIGIKLDGSGERKSILVTAASGGVGHYAVQLAKLGNTHVTATCGARNIELVKSLGADEVIDYKTPDGAALKSPSGKKYDAVIHCAMGFPWSTFEPNLTVTGKVVDITPSSASMLTFALKKLTFSKKQLVPLLLFPKGEDLQHLIHLVKEGKLKTVVDSKYPLTKAEDAWAKSITGHATGKIIIEF

SEQ ID NO: 343 - DNA, 987 bp, Glycine max
atgaatctgatgcaggcggttcgctacgacgcctacgggggaggtcctgccggcctcaagcacgttgaagttgccgttcccagtccaaaggcaaatgaggttttaatcaaactggaagcagttagcattaaccctattgattggaagattcagaagggtcttctccgtcctttatttctccccagaacctttccccacataccttgcactgatgtggctggagaaatagttgagatcggaactcaagtcaaagatttcaaagttggcgaccaagtccttgctaaactcactcatcaatatggaggtgggtttgccgagtttgctgtggctagtgagagcttaacagcagccagaccatctgaggtctcagccgctgaagctgcagcattgccaatcgccgggcttacagctcgtgatgccctcactcaaattgcaggagtcaagcttgatgggactggccagctcaagaacattttagtaactgctgcttcaggtggtgtaggtcactatgctgttcaactagcaaaactaggcaacacccatgtcacagccacttgtggggctcgcaacattgactttgttaagggcttaggtgccgatgaggttcttgactacaggactccagagggggctgcactgaagagtccatctggtaggaaatacgatgcagtgataaattgtacaactggaatatcttggtcaacttttgatcctaatttgactgaaaaagcggtggtagttgatttaacacctaatgcaagttcattgtggactgctgccatgaagaaaattactttttccaagaagcagctggtgccattttttgtaaatgtccagcgtgagggcctggaatatctacttcaattagtgaaggacgggaaactgaagtctgttattgactccaagtttcctttgagcaaagctgaagatgcttgggctaagagcattgatggccatgctaccggaaaaatcattgtggagccatag

SEQ ID NO: 344 - protein, 328 aa, Glycine max
MNLMQAVRYDAYGGGPAGLKHVEVAVPSPKANEVLIKLEAVSINPIDWKIQKGLLRPLFLPRTFPHIPCTDVAGEIVEIGTQVKDFKVGDQVLAKLTHQYGGGFAEFAVASESLTAARPSEVSAAEAAALPIAGLTARDALTQIAGVKLDGTGQLKNILVTAASGGVGHYAVQLAKLGNTHVTATCGARNIDFVKGLGADEVLDYRTPEGAALKSPSGRKYDAVINCTTGISWSTFDPNLTEKAVVVDLTPNASSLWTAAMKKITFSKKQLVPFFVNVQREGLEYLLQLVKDGKLKSVIDSKFPLSKAEDAWAKSIDGHATGKIIVEP

SEQ ID NO: 345 - DNA, 987 bp, Gossypium raimondii
atggctgaaaatcctatgcatgctttacaatataacagctatggcggaggtgctgctgctttgaagcatgttgaagttccgatccccactccaaataaaggtgaaattttgcttaagctggaggcaactagtctaaacccaattgactggaaaatacagaaagggattctgcgcccacttttacctagaaaattcccccacatacctgcaagtgatgtagccggagaagtcgtaaaggttggaccaagagtcacaaattacaaagttggggataaagttgtatctcttcttgatcatttgactggtggactagctgaatatgctgtggctacggagaatctgacagttgcaaggccaccagaaatatcagttgccgaagctgctggtttacccatggctggtctcacagctcaccgagcagtcacccatggggctggggtcaagcttgacggaagtggccagcaattaaacctcttgattactgctgcttcaggtggtgtaggtcattacgcagttcaactagcaaagcttggaaacacacatgtaacagccacttgtggggctcgtaatctggattttgtcaaaagccttggagcagatgaggttcttgactacaaaactcccgacggtgcagctctgaaaagcccttccggtcgcaaatacgatgtagtgatccactgtgcttctggtattccttggtctacctttgaacctaatctaagttcaaacgggaaggtaatcgacataacccctggtcttagtgcttttctaacttgtgctatgaaaaagcttaccttctcaaagaagaagctggtaccactctttatgtcacctaaaaaggagaacctcgattatctggttaacttattgaaagacgggaagcttaagacggtaatcgattcaacgtatcccttaagtaaggctgaggaagcatgggctaagagcatggatggtcatgccactggtaagatcattgtggagccttaa

SEQ ID NO: 346 - protein, 328 aa, Gossypium raimondii
MAENPMHALQYNSYGGGAAALKHVEVPIPTPNKGEILLKLEATSLNPIDWKIQKGILRPLLPRKFPHIPASDVAGEVVKVGPRVTNYKVGDKVVSLLDHLTGGLAEYAVATENLTVARPPEISVAEAAGLPMAGLTAHRAVTHGAGVKLDGSGQQLNLLITAASGGVGHYAVQLAKLGNTHVTATCGARNLDFVKSLGADEVLDYKTPDGAALKSPSGRKYDVVIHCASGIPWSTFEPNLSSNGKVIDITPGLSAFLTCAMKKLTFSKKKLVPLFMSPKKENLDYLVNLLKDGKLKTVIDSTYPLSKAEEAWAKSMDGHATGKIIVEP

SEQ ID NO: 347 - DNA, 990 bp, Gossypium raimondii
atggataagattaagagtatgatgcgcgctgttcagtacagtaaatatggcggaggagtcgccgatctcaagcatgttgaagttccggttcccagtccaaaaaaggatgaagttttgatcaaagtagagacagctagtattaacccaatcgactggaaactacaggatggggtagctcggccatttttacctcggaaattcccccacattcctggtaccgatgtagcaggagaagtcgtacaagttggatcagaagtccagagtttcaaagttggggagaacgttgttgccgtacttggtaatggaggtgcactagctgaatatgctgtggctaatgaaggttccacagtttcaaggcctccagaggtatcagcccgtgaagctgcagctttgccaattgctggcctcgcagctcaccagtcactcacccagcttgctgggatcaaactcgatggaaccggcccagaagtgaatgtattggttaccgctgcttcaggtggtgtaggtcaatatgccgttcaactcctaaagctcgcaaatgcacacattacagccacttgtggggctcgtaacatagatttagtcaggagcctgggggctgatgaggttcttgactacaaaactcctgatggggtggctctcaagagcccttctggtcgaaaatacgatgtaatcatccactgcgcacacaacattccttggtctacctttgaggctaacttgacttcaaaagggaaggtagtagataccactcctggtttcggcactttgatgagtgttgctttcaaaaagataacattcgcaaagaggcaactcatacccttgtttacctcacctaagaaagagaacctcgaatttcttgttaagttggtgaaagaaggaaagcttaagccagtaattgattcagtacatcctctaagcaaggctgaagaggcttgggcgaagagcattgacggccatgccactggcaagattcttgtggagccatag

SEQ ID NO: 348 - protein, 329 aa, Gossypium raimondii
MDKIKSMMRAVQYSKYGGGVADLKHVEVPVPSPKKDEVLIKVETASINPIDWKLQDGVARPFLPRKFPHIPGTDVAGEVVQVGSEVQSFKVGENVVAVLGNGGALAEYAVANEGSTVSRPPEVSAREAAALPIAGLAAHQSLTQLAGIKLDGTGPEVNVLVTAASGGVGQYAVQLLKLANAHITATCGARNIDLVRSLGADEVLDYKTPDGVALKSPSGRKYDVIIHCAHNIPWSTFEANLTSKGKVVDTTPGFGTLMSVAFKKITFAKRQLIPLFTSPKKENLEFLVKLVKEGKLKPVIDSVHPLSKAEEAWAKSIDGHATGKILVEP

SEQ ID NO: 349 - DNA, 999 bp, Gossypium raimondii
atgaaaaaaatggctgaaaatcttatgcatgctttacaatataacagctacggcggaggcgctgctggtttgaagcatgttgaagttccgatccccactccaaataaaggtgaaattttgcttaaactggaggcaactagtctaaacccggttgactggaaaatacagaaagggatgctgcgcccatttttacctagaaaattcccctacatacctgctactgatgtagcgggagaagtcgtaaaagttggaccgggagtcacaaattacaaagctggggataaagttgtgtctatgctccatcattttactggaggtggactagctgaatatgctgtggctaaggagaatctgactgttgcaaggccaccagaagtatcagctgctgaaggtgcaggtttgcctgttgctggtcttacagctcaccaggcactcacacagtcggctggggtcaagcttgatggaagtggccagcaagtaaacctcttgattactgctgcttcaggtggtgtaggtcaatatgcagttcaactagcaaagcttggaaacacccatgtgacagccacttgtggggctcgcaatctggatttcgtcaaaagcctcggagcagatgaggttcttgactacaaaactcccgacggtgcagctctaaaaagcccttcgggtcgcaaatatgatgcagtgatccactgtgcaatgggcattccttggtctacctttgaacctaatctaagttcaaacgggaaggtaatcgatataaccccaggtcctagtgctctgctaacttttgctatgaaaaagcttaccttctcaaagaagaacctggtaccactgctattgtcacctaagaaggagaacctcgaatatctaattaacttagtgaaagagaagaagcttaagacggtaattgattcaaagcatcccttaagtaaggctgaagaagcatgggctaagagcattgatggccatgcccctggtaagatcattgtggagccttaa

SEQ ID NO: 350 - protein, 332 aa, Gossypium raimondii
MKKMAENLMHALQYNSYGGGAAGLKHVEVPIPTPNKGEILLKLEATSLNPVDWKIQKGMLRPFLPRKFPYIPATDVAGEVVKVGPGVTNYKAGDKVVSMLHHFTGGGLAEYAVAKENLTVARPPEVSAAEGAGLPVAGLTAHQALTQSAGVKLDGSGQQVNLLITAASGGVGQYAVQLAKLGNTHVTATCGARNLDFVKSLGADEVLDYKTPDGAALKSPSGRKYDAVIHCAMGIPWSTFEPNLSSNGKVIDITPGPSALLTFAMKKLTFSKKNLVPLLLSPKKENLEYLINLVKEKKLKTVIDSKHPLSKAEEAWAKSIDGHAPGKIIVEP

SEQ ID NO: 351 - DNA, 990 bp, Gossypium raimondii
atggctgaaactcttatgcatgctttacaatatgacagctatggcggaggcgctgctgctttgaagcatgttgaagttccaatacccactccaaataaagatgaaatgttgcttaaactggacgcaattagtctaaacccagttgactggaaaatacaggaaggggtgcttcgcccatttttacctagaaaattcccctgcatacctgctagtgatgtagcaggagaagtcgtaaaggttggaccaggagttacaaatttcaaagctggggataaagttgtagctgcgcttcatcattttaccggaggtggactagctgaatatgctgtggctaaggagaatctgacagttgcaaggtcaccagaagtatcagctgccgaaggtgcaggtttgcctgttgctggtctcacagctcaccaggcactcacccaggcagctggggtcaagcttgacggaagtggccagcaagtaaacctcttgattactgctgcttcaggtggtgtaggtcattacgcagttcaactagccaagcttggaaacacacatgtaacagccacttgtggggctcgtaatctggattttgtcaaaagccttggagcagacgaggttcttgactacaagactcccgacggggcggctctaaaaagcccttcgggtcgcaaatatgatgcagtgatccactgtgcagcgggcattccttggtctacctttgaacctaatctaagttcaaatgggaaggtaatcgatataacccctggtcctagtgctttcctaacttttgctatgaaaaagcttactttctcaaagaagaagctggaaccactctttgtatcccttaagaaggagacccccaattatttcgttaacttggtgaaagacgggaagcttaagacggtaatcgattcaaagtatcccttaagtaaggctgaagaagcatgggctaagagcattgatggtcatgcccctggtaagatcattggggagccttag

SEQ ID NO: 352 - protein, 329 aa, Gossypium raimondii
MAETLMHALQYDSYGGGAAALKHVEVPIPTPNKDEMLLKLDAISLNPVDWKIQEGVLRPFLPRKFPCIPASDVAGEVVKVGPGVTNFKAGDKVVAALHHFTGGGLAEYAVAKENLTVARSPEVSAAEGAGLPVAGLTAHQALTQAAGVKLDGSGQQVNLLITAASGGVGHYAVQLAKLGNTHVTATCGARNLDFVKSLGADEVLDYKTPDGAALKSPSGRKYDAVIHCAAGIPWSTFEPNLSSNGKVIDITPGPSAFLTFAMKKLTFSKKKLEPLFVSLKKETPNYFVNLVKDGKLKTVIDSKYPLSKAEEAWAKSIDGHAPGKIIGEP

SEQ ID NO: 353 - DNA, 993 bp, Helianthus annuus
atggccggaaaactgatgcatgcggtttggtacacttgtttcggcggaggtgttgccggtttgaagcatgttgaaattcctattccttctcctggtcatgatgagattttgatgaaaatagaagcagcaagcataaacccgattgactggaagatacaggacggcttcctacgccctcttttacccaaaaagtttcctttagtaccacttagtgacgtggcaggagaagttgtggaagttggacctggtgtaacgaactttaaaactggtgacaaaattgttgcaactcttgggggtctgagtggaggtggagggctagccgattatgccgtggctaaagaaagcttaacagttgcaagaccaccagaagtaccagctgcagatggtgcctgtctaggtattgcagcgtgcgccgccctgcactcccttactgtaaccggtggactaaaactggaaaagacagaaccacgaaccaacgtcctaataactgccgcttcaggtggtgttggtcactatgcagtccagctagcaaaactaggtaacacccacgtgaccgcaacatgcggggcccgcaacatcgatttcgttaaaaacttaggagccgacgaggttttggactacaagacccccgaaggagccgccctcaaaagcccatcgggccagaaatatgacttagtggtcaattgcaccactggtatcccttttaaaactttcgagcccaacctgagcgcaactgggaaggttattgatataacaccaggtggtggtacattttttaattatgcattgcaaaaactaactttttcgaagaagcaagttataccattactcatgaatccaaccgcccaagagattggctttcttgtgaagctgacaaaagaagggaaactgaaaaccgttatcgactcgagatacccttttagtcaggctgaagcggcttgggccaagagcatcgagggccatgccactgggaaggtggttgtcgagatgtaa

SEQ ID NO: 354 - protein, 330 aa, Helianthus annuus
MAGKLMHAVWYTCFGGGVAGLKHVEIPIPSPGHDEILMKIEAASINPIDWKIQDGFLRPLLPKKFPLVPLSDVAGEVVEVGPGVTNFKTGDKIVATLGGLSGGGGLADYAVAKESLTVARPPEVPAADGACLGIAACAALHSLTVTGGLKLEKTEPRTNVLITAASGGVGHYAVQLAKLGNTHVTATCGARNIDFVKNLGADEVLDYKTPEGAALKSPSGQKYDLVVNCTTGIPFKTFEPNLSATGKVIDITPGGGTFFNYALQKLTFSKKQVIPLLMNPTAQEIGFLVKLTKEGKLKTVIDSRYPFSQAEAAWAKSIEGHATGKVVVEM

SEQ ID NO: 355 - DNA, 975 bp, Helianthus argophyllus
atggcggtttggtacacttgttacggcggaggtactgccggtttgaagcatgttgaaattcctattccttctcctggtcatgatgagattttgatgaaaatagaagcagcaagcataaacccgattgactggaagatacaggacggcttcctacgccctcttttacccaaaaagtttcctataataccacttagtgacgtggcaggagaagttgtggaagctggacctggtgtaacgaactttaaaactggtgacaaaattgttgcaactcttgggggtctgagtggaggtggagggctagccgagtatgccgtggctaaagaaagcttaacagttgaaagaccaccagaagtaccagctgcagatggtgcctgtctaggtattgcagcgtgcgccgccctgcactcccttactgtaaccggtggactaaaactggaaaagacagaaccacgaaccaacgtcctaataactgccgcttcaggtggtgttggtcactatgcagtccagctagcaaaactaggtaacacccacgtgaccgcaacatgcggggcccgcaacatcgatttcgttaaaagcttaggagccgacgaggttttggactacaagacccccgaaggagccgccctcaaaagcccatcgggccagaaatatgacttagtggtcaattgcaccactggtatcccttttaaaactttcgagcccaacctgagcccaactgggaaggttattgatataaccccaggtggtggtacatttcttaattatgcagtgcaaaaactaactttttcgaaaaagcaagttataccgttaatcatgaatccaaccgcccaagagattggttttcttgtgaacctcacaaaagaagggaaactgaaaaccgttatcgactcgagatacccttttagtcaggctgaagcggcttgggccaagagcatcgagggccatgccactgggaaggtggttatcgagatgtaa

SEQ ID NO: 356 - protein, 324 aa, Helianthus argophyllus
MAVWYTCYGGGTAGLKHVEIPIPSPGHDEILMKIEAASINPIDWKIQDGFLRPLLPKKFPIIPLSDVAGEVVEAGPGVTNFKTGDKIVATLGGLSGGGGLAEYAVAKESLTVERPPEVPAADGACLGIAACAALHSLTVTGGLKLEKTEPRTNVLITAASGGVGHYAVQLAKLGNTHVTATCGARNIDFVKSLGADEVLDYKTPEGAALKSPSGQKYDLVVNCTTGIPFKTFEPNLSPTGKVIDITPGGGTFLNYAVQKLTFSKKQVIPLIMNPTAQEIGFLVNLTKEGKLKTVIDSRYPFSQAEAAWAKSIEGHATGKVVIEM

SEQ ID NO: 357 - DNA, 990 bp, Helianthus paradoxus
atggcggataagcttatgcgcgcgcttcagtatgattcctatggaggaggagctgctgctcttaagcatgttgaagttcctattcctaagccaagtaaaggcgaactgcttttaaaactcgaggcgactagcataaatccagtcgattggaagatacagaaaggcatgttacgccctctattcccacgcaaattcccttggataccagccactgatgtagcaggagaggtgatagatgttggacctggagtaaataatttcaaagttggtgataaagttgtatccatgctcgacgtttttaaaggcggaggaccatctgagtatgcagtgggcagtcaaaaactaaccgttttgagaccgccagaggtatcagcagccgaaggtgccgggctacccgtagccggtcttacagcactccaagccctaacctatcacggcggtatcaccctagacaaaaccggccccaccaccaacgtcctcatcaccgccgcttcaggtggtgtaggccaatacgccgtccaactagccaagctaggtaacgtccacgtcaccgccacttgcggggaacgcaacatagacttagttaaaagcctaggagccgacgaagttattgattataaaaccccacaaggtgccgctctaaaaagcccatcggataagaaatatgatgtggtagttcattgtgccactcctattccttggtctactttcgagccgaatcttggcccgaatgggaaggtcatagacataacaccgggtgcgagcgccttttggactgcggttgtgaagaaagtcacttgctcgaaaaagaaattggtcccgagtcttttgattccgaaagctgagaacttggagtacctggttgggttggtgaaggagggaaaacttaaaacggttatcgactcgaaatatccgttaagtaagggtgaagaggcttgggccaagagcattgatgggcatgctactggtaagattattgttgagccttag

SEQ ID NO: 358 - protein, 329 aa, Helianthus paradoxus
MADKLMRALQYDSYGGGAAALKHVEVPIPKPSKGELLLKLEATSINPVDWKIQKGMLRPLFPRKFPWIPATDVAGEVIDVGPGVNNFKVGDKVVSMLDVFKGGGPSEYAVGSQKLTVLRPPEVSAAEGAGLPVAGLTALQALTYHGGITLDKTGPTTNVLITAASGGVGQYAVQLAKLGNVHVTATCGERNIDLVKSLGADEVIDYKTPQGAALKSPSDKKYDVVVHCATPIPWSTFEPNLGPNGKVIDITPGASAFWTAVVKKVTCSKKKLVPSLLIPKAENLEYLVGLVKEGKLKTVIDSKYPLSKGEEAWAKSIDGHATGKIIVEP

SEQ ID NO: 359 - DNA, 993 bp, Helianthus petiolaris
atggccggaaaactgatgcatgcgatttggtatacttgttacggcggaggtgttgccggtttgaagcatgttgaagttcctattccttctcctggtcatgatgagattttgatgaaaatagaagcagcaagcataaacccgattgactggaagatacaggacggcttcctacgccctcttttacccaaaaagtttcctgtaataccacttagtgacgtggcaggagaagttgtggaagttggaccgggtgtaacgaactttaaaactggtgacaaaattgttgcatctcttgggggtctgagtggaggtggagggctagccgagtatgccgtggctaaagaaagcttaacagtttcaagaccaccagaagtaccagctgcagagggtgcttgtctaggtattgcagggtgcgccgccctgcactcccttactgtaaccggtggactaaaactggaaaagacagaaccacgaaccaacgtcctaataactgccgcttcaggtggtgttggtcactatgcagtccagctagcaaaactaggtaacacccacgtgaccgcaacatgcggggcccgcaacatcgatttcgttaaaagcttaggagccgacgaggttctggactacaagacccccgaaggagccgccctcaaaagcccatcgggccagaaatatgacttagtggtcaattgcaccaccggtatcccttttaaaactttcgagcccaacctgagcgcaactgggaaggttattgatataaccccaggtggtggtacatttcttaattatgcagtgcaaaaagtaactttttcgaaaaagcaagttataccgttaatcatgaatccaactgcccaagagattggttttcttgtgaagctgacaaaagaagggaaactgaaaaccgttatcgactcgagatacccttttagtcaggctgaagcggcttgggccaagagcatcgagggccatgccactgggaaggtggttgtcgagatgtaa

SEQ ID NO: 360 - protein, 330 aa, Helianthus petiolaris
MAGKLMHAIWYTCYGGGVAGLKHVEVPIPSPGHDEILMKIEAASINPIDWKIQDGFLRPLLPKKFPVIPLSDVAGEVVEVGPGVTNFKTGDKIVASLGGLSGGGGLAEYAVAKESLTVSRPPEVPAAEGACLGIAGCAALHSLTVTGGLKLEKTEPRTNVLITAASGGVGHYAVQLAKLGNTHVTATCGARNIDFVKSLGADEVLDYKTPEGAALKSPSGQKYDLVVNCTTGIPFKTFEPNLSATGKVIDITPGGGTFLNYAVQKVTFSKKQVIPLIMNPTAQEIGFLVKLTKEGKLKTVIDSRYPFSQAEAAWAKSIEGHATGKVVVEM

SEQ ID NO: 361 - DNA, 1008 bp, Hordeum vulgare
atggccaccccagcgtcgacgccggcgaagatgcgggccgtgcagtacgacgcctgcggcagtggcgccgccggcctcaagcatgtagaactccccgtcccttcagcaaagaagaatgaggtcctgttgaaactgcaagctgcaaccatcaatccagttgactggaagatacagaaaggggacttgcggcctctgctgcctcgtagactgccttttatcccagtgactgatgttgccggagtagttgttgatgttggtcctggagtaaaaggtctcacagcaggcgatcaagtcgtcgccatgttgaactctcttaacggaggtggactcgcagagtacgcagtagcgtccgcaaacctgactgtcaaaaggccagctgaggtttctgcagctgagggtgctgggcttcccattgctgcgggcactgcgctccaggcactgaggtccattggtgccaagtttgatggcaccggcaagccattaaacgtgttggtcaccgctgcctctggcggcgtaggcctgtacttggtgcagcttgcaaagctagcgaaccttcatgttaccgccacctgcggcgcccgcaacatggatcttgtgaagagcttgggcgcggatgaggtgatggactacaagaccccagaggggacgagcctgcagagcccctccggcaggaagtacgacggcgtggttcactgcaccgtcggtgtcagctggtcgtctttccagccattgctgactgacgccgggagagttatcgacatcacccccaatttctcggccatcctcacatctgcgctgcactgggtgacgttctccaagaagcgcctcgtgcccctgctcctgtcgcccaacaaggcggacctggagttcttggtcgggctgctcaaggaaggcaagctgaagacggtgatcgactcgaggttccccttgagcgacgcaggcaaggcgtggcaaagcagtatcgatggccatgccactggtaagattgttgttgagatggagagctga

SEQ ID NO: 362 - protein, 335 aa, Hordeum vulgare
MATPASTPAKMRAVQYDACGSGAAGLKHVELPVPSAKKNEVLLKLQAATINPVDWKIQKGDLRPLLPRRLPFIPVTDVAGVVVDVGPGVKGLTAGDQVVAMLNSLNGGGLAEYAVASANLTVKRPAEVSAAEGAGLPIAAGTALQALRSIGAKFDGTGKPLNVLVTAASGGVGLYLVQLAKLANLHVTATCGARNMDLVKSLGADEVMDYKTPEGTSLQSPSGRKYDGVVHCTVGVSWSSFQPLLTDAGRVIDITPNFSAILTSALHWVTFSKKRLVPLLLSPNKADLEFLVGLLKEGKLKTVIDSRFPLSDAGKAWQSSIDGHATGKIVVEMES

SEQ ID NO: 363 - DNA, 990 bp, Ipomoea nil
atggcaggaaagcttatgcgcgctttgcagtatgacgggtatggaggcggcgctgctggtttgaagcacattgaagttcctgtgcccactcctaataaaaatgaagtcttgctaaagctagaagcaacaagcataaacccggttgattggaaaattcaaaaagggatgatccgtcctcttcttcctggcaaatttccttacatccccgctactgatgtagcgggagaagtagtggaggttggggctggtgtcaagaatttcaaggtcggtgacaaagttgtggctatgctcagtcatcttactggaggtggatttgcggagtatgctgtagctaaggagagcttaactgccataaggccaccggaggtatcgcctgccgaagctgcaggccttcctgtcgcaggcctaacagctctccaggccctcgttggagctgctggggtgaagctcgacgggagtgggccccagaagaacatactcgtgacagccgcctctggtggtgtgggtcactatgcggttcaactagcaaagctcgggaacgcacacgttaccgctacctgtggggcccgcaacctcgggttcgtgaagagcttaggggcagacgaggttattgactacaagaccccagacggggcagctctcaagagcctttcgttgcaaacatacgacgcggtgatccactgcgccacgggcattccctggtctactttcgagccaaacctgagcaagaaaggcaaggtgatcgacctcacccccggggctagcgccatgtggacgttcgcggtgaagaaactcacgatgtcgaagaagcaattggtgccattgcttctaatccccaagagtgagaacctggagtatcttgttgggttggtgaaggaggggaagctgaagagtgtgattgactctaaacatcctctaagcaaggcagaagaagcttgggctatgagcattgatgggcatgccacagggaaaatcattgtgcagccttaa

SEQ ID NO: 364 - protein, 329 aa, Ipomoea nil
MAGKLMRALQYDGYGGGAAGLKHIEVPVPTPNKNEVLLKLEATSINPVDWKIQKGMIRPLLPGKFPYIPATDVAGEVVEVGAGVKNFKVGDKVVAMLSHLTGGGFAEYAVAKESLTAIRPPEVSPAEAAGLPVAGLTALQALVGAAGVKLDGSGPQKNILVTAASGGVGHYAVQLAKLGNAHVTATCGARNLGFVKSLGADEVIDYKTPDGAALKSLSLQTYDAVIHCATGIPWSTFEPNLSKKGKVIDLTPGASAMWTFAVKKLTMSKKQLVPLLLIPKSENLEYLVGLVKEGKLKSVIDSKHPLSKAEEAWAMSIDGHATGKIIVQP

SEQ ID NO: 365 - DNA, 993 bp, Lotus japonicus
atggccggaaaaatgatgcacgcggttcagtacgatgcttatggcggaggtgccgccggattgaagcatgttgaagttcccgttcccagtccgaagaaaaacgaggttttgctgagattggaagctgctagcatcaaccctgttgattggaagatccagaagggtgttctgcgccctttatttttacctcgaagctttccccacataccttgcactgatgtagctggagaggtagcagaggttggacctcaagtcaaagatttcaaagttggagataaagtcattgctaaactctccactcaatatggaggtggactggctgagtttgctgtggccagtgagaccttaacagctgcaagaccatctcaagtctcacctgctgaagctgccggtttgcctattgctggactcacagctcgtgatgccctcactcaaattgctggagtcaagcttcatgagactggccagcccaagaacattttagtcactgctgcttcaggtggtgttggttcatatgctgttcaacttgcaaaactagggaacaaccatgtcacagccacttgtggagctcgtaatattgactttgttaagggcttaggtgctgatgaggttcttgactacaagactccagaaggggcagcactgaggagtccatctggtaggaaatatgatgcagttatacattgcacaactggaataccttggtccacttttgatcctattttgactgaaagaggggttgtggttgatttaacacccaatggaagttcttttatgactttcgccctgaagaaacttactttttctaagaagcagctggtgccatttttcgtgactgtcaagcgtgagggtctggaatatctaactcaactggtgaaggatgggaaactcaagacaataattgactctaagtttcctttgagcaaagctgaagatgcctgggctaagagcattgatggccatgctactggaaaaatcatcgtggagccatag

SEQ ID NO: 366 - protein, 330 aa, Lotus japonicus
MAGKMMHAVQYDAYGGGAAGLKHVEVPVPSPKKNEVLLRLEAASINPVDWKIQKGVLRPLFLPRSFPHIPCTDVAGEVAEVGPQVKDFKVGDKVIAKLSTQYGGGLAEFAVASETLTAARPSQVSPAEAAGLPIAGLTARDALTQIAGVKLHETGQPKNILVTAASGGVGSYAVQLAKLGNNHVTATCGARNIDFVKGLGADEVLDYKTPEGAALRSPSGRKYDAVIHCTTGIPWSTFDPILTERGVVVDLTPNGSSFMTFALKKLTFSKKQLVPFFVTVKREGLEYLTQLVKDGKLKTIIDSKFPLSKAEDAWAKSIDGHATGKIIVEP

SEQ ID NO: 367 - DNA, 990 bp, Malus x domestica
atggccaatgagatcatgcatgcggttcagtacgacagctatggcggaggaccttctggcttaaagcatgttgaagttccgattccaaatccgagcaaggatgaggtgttgctgaaggtggaggcagccagtctaaacccatttgattggaaagttcagaagggcatgctgtggccttttttgcctagcaggtttccgaacataccgggtaccgatgtggcaggagaggttgtaagggtaggccctggagtaaaaaatttcaaagctggtgacaaagttgttgcaatggttaaccctcgtaatggaggtggactagctgaacttgccgtgacaatgaagagtttgaccgttgcaaggccaccggaagtttcagcagccactgctgtaggattacccgttgctggtctcacagctcaccaggcccttgtacaacctgcagggatcaagcttgatggaagtggtcagcaagcaaacattctgatcacagctgcttcaggcggtgtaggactctatgcggttcaactggcaaaactcggaaacactcatgttacagccacttgtggtgcgcgcaacattgaactggtcaagagcctaggggctgatgaggttattgactataagaccccagaaggtgcagctcttaagagtccatccggtcgaaaatatgatgctgtgatccactgtgcaacaggcattccttggtcaacttttgagcctaatttgagtgcgaacggtaaggtaatagatattactcccaccctcggttctgtggcaagctttgcattgaagaaacttaccttttccaaaaagcaattggtgccactgctcttatctcctaaggccgataaccttgattatcttgttaagttggtgaaagaagggaagctcaagacgataattgactcaaagtatcccctggccaaggcagaggacgcttgggctaaaagcatggatggccatgctaccggaaagataattgtggagccttag

SEQ ID NO: 368 - protein, 329 aa, Malus x domestica
MANEIMHAVQYDSYGGGPSGLKHVEVPIPNPSKDEVLLKVEAASLNPFDWKVQKGMLWPFLPSRFPNIPGTDVAGEVVRVGPGVKNFKAGDKVVAMVNPRNGGGLAELAVTMKSLTVARPPEVSAATAVGLPVAGLTAHQALVQPAGIKLDGSGQQANILITAASGGVGLYAVQLAKLGNTHVTATCGARNIELVKSLGADEVIDYKTPEGAALKSPSGRKYDAVIHCATGIPWSTFEPNLSANGKVIDITPTLGSVASFALKKLTFSKKQLVPLLLSPKADNLDYLVKLVKEGKLKTIIDSKYPLAKAEDAWAKSMDGHATGKIIVEP

SEQ ID NO: 369 - DNA, 990 bp, Malus x domestica
atggccaatgagaccatgcacgcggttcagtacgacaactatggcggcggaacttctggtttaaagcatgttgaagttccgattccaaatccgaaaaaagatgaggtgttgctgaaattggaggcaactagtctaaacgcaattgattggaaagctcagaaaggcatgctctggcctttgttgcctcgcaggtttccgcacatacctggtattgatgtggcaggagaggttgtaaaggtaggacctggagtaaaaaaattcaaacctggtgacaaagttgttgggaaggttaacactcttactggaggtggactagctgaatttgccgtgacaatggagagtttaactgttgcaaggccaccggaagtttcagcagccaccgctgtaggattacccgttgctggtctcacagctcaccaggctcttacacaaactgcagggatcaagcttgatggaagtggtcagcaagcaaacatcctgatcacagctgcttcaggtggtgtaggtctctacgcggttcagttggcaaagctcggaaatactcatattacagccacttgtggtgcccgcaacattgaactggtcaaaagcctaggggctgatgaggttattgactacaagaccccagaaggtgcagctcttaggagtccatctggtcgaaaatatgatgttgtgatccactgtgcaacatgcattccttggtcaacttttgagcctaatttgagtgcgaacggtaaggtaatagatgttactcccacccccagctctctgtttagcgttgcactgaagaaacttaccttttctaagaagcaactggtgccactgttcttatttcccatggctgataaccttgagtatcttattaagttggtgaaagaagggaagctgaagactataattgactcaaagtatcccctggccaaggcggaggacgcttgggataggatcagcgatggccatgctaccggaaagataattgtggagccttag

SEQ ID NO: 370 - protein, 329 aa, Malus x domestica
MANETMHAVQYDNYGGGTSGLKHVEVPIPNPKKDEVLLKLEATSLNAIDWKAQKGMLWPLLPRRFPHIPGIDVAGEVVKVGPGVKKFKPGDKVVGKVNTLTGGGLAEFAVTMESLTVARPPEVSAATAVGLPVAGLTAHQALTQTAGIKLDGSGQQANILITAASGGVGLYAVQLAKLGNTHITATCGARNIELVKSLGADEVIDYKTPEGAALRSPSGRKYDVVIHCATCIPWSTFEPNLSANGKVIDVTPTPSSLFSVALKKLTFSKKQLVPLFLFPMADNLEYLIKLVKEGKLKTIIDSKYPLAKAEDAWDRISDGHATGKIIVEP

SEQ ID NO: 371 - DNA, 993 bp, Marchantia polymorpha
atggccgaaatgatgcaagctgtacagtattctagctatggcggagcgcatgcggctcttcagcacaaggaaatcccgatccctgtaccgaagaagggagagattttggtcaaggtcgaagcagcctctgtgaatcccgtcgactggaaaatgcagggtggagtgatgcgtcccatgctcccagcgaaattccctcacacaccaggcacggacatcgcaggggaggtcgtgaaagttggatctgaagtcaaggactttgcacctggtgacaaggtcgtagcttggcttgaattgaagcatggaggtgcaatggcgcagtacgccgtcgccaacccgaaaacgactgtcgtgaggcctcctgaagtgtcggccgttgaagctgcgtgccttcctgtggcagccctaaccgcactgcaagctttgacaagcggtggcatgaattttgacggaagctacagcggaaacgttcttgttaccggggcttctggtggtgttggaacctacgctgtccagcttgggaaaattgctggtgcccatgtgaccgcgacttgtggagagcgaaacatcgagctgatcaagtttttaggagctgatgaagtattggactacaagacgcctgagggcaagaagctcattagcccgtctggaaagaagtatgatctcgtggtcaatgctgccgccagcgcagtcactttctccgacatgcagccacagttagctcccaagggtgtcgttttcgaactgactcctagccccaaaacctttttgacttctgttattaagagggtgtctatgtcgaagcaaaagtacaaccagctcatgctaaatgtggaggcacgcaacctagaaatgctggtcggtttcgttaaagaaggaaaattgcacgccgtaatagattctaagttcccgttggccaaagttgaggaggcatggaagaaaagcaaggaggggcacgccgtcggtaaaatcgtcatcactgttactgaggaatag

SEQ ID NO: 372 - protein, 330 aa, Marchantia polymorpha
MAEMMQAVQYSSYGGAHAALQHKEIPIPVPKKGEILVKVEAASVNPVDWKMQGGVMRPMLPAKFPHTPGTDIAGEVVKVGSEVKDFAPGDKVVAWLELKHGGAMAQYAVANPKTTVVRPPEVSAVEAACLPVAALTALQALTSGGMNFDGSYSGNVLVTGASGGVGTYAVQLGKIAGAHVTATCGERNIELIKFLGADEVLDYKTPEGKKLISPSGKKYDLVVNAAASAVTFSDMQPQLAPKGVVFELTPSPKTFLTSVIKRVSMSKQKYNQLMLNVEARNLEMLVGFVKEGKLHAVIDSKFPLAKVEEAWKKSKEGHAVGKIVITVTEE

SEQ ID NO: 373 - DNA, 990 bp, Medicago truncatula
atggcttccaaactcatgcatgcagttcaatatgattcctatggtggaggtccctctggattgaagcatgttgaagttcctgttccaattccaaagaccaatgaggttttaatcaaattggaagcaacaagcattaacccagttgattggaagattcaaagcggtcttcttcgccctttattgccacgaaaatttcccttcattccttgcactgatgtatcaggagaggttgtagaggttggaccgcaagtcaacgattttaaagttggagacaaagttattaccaaactcacaaatccatatgcaggtggactagctgagtttgcggtggttgctgagagctcaacagctgccagaccatctgaagtctccgcagctgaagcagcgagtttacctgtagccggtcaaacagctcgtgatgtgctcacccaagttgggggagttaagtttgatgggactggtgagcccaagaacattttggtaactgctgcttcaggtggtgtaggtgtatttgttgttcaacttgcaaaactagggaacaaccatgtgacagctacttgtggtgctcgcaacattgaccttatcaagagcttaggtgccgatgaggttctcgactacaagactccagaaggagcatcgctaaaaagtccttctggtaggaaatatgatgtagtgatacattgtactgctggaataccatggtcagtttttgagcctaatttgtcggaaaatggggttgtagcggatataacacctggcccgagatcaatgtggacttttgcggtgaagaaacttaccttttcgaagaagcagtgggtgccgtttcttttaactccaactcgcgagggcttagaacatctcggtcagttagtgaaggatggaaaactcaagacaattattgactccaagtttcctttgagcaaagctgaagatgcttgggctaagagcatcgatggccatgctactggaaaaatcatagtggagcaatag

SEQ ID NO: 374 - protein, 329 aa, Medicago truncatula
MASKLMHAVQYDSYGGGPSGLKHVEVPVPIPKTNEVLIKLEATSINPVDWKIQSGLLRPLLPRKFPFIPCTDVSGEVVEVGPQVNDFKVGDKVITKLTNPYAGGLAEFAVVAESSTAARPSEVSAAEAASLPVAGQTARDVLTQVGGVKFDGTGEPKNILVTAASGGVGVFVVQLAKLGNNHVTATCGARNIDLIKSLGADEVLDYKTPEGASLKSPSGRKYDVVIHCTAGIPWSVFEPNLSENGVVADITPGPRSMWTFAVKKLTFSKKQWVPFLLTPTREGLEHLGQLVKDGKLKTIIDSKFPLSKAEDAWAKSIDGHATGKIIVEQ

SEQ ID NO: 375 - DNA, 990 bp, Nicotiana tabacum
atggctgggaaggtgatgcatgctatccaatacaactcttatggtggcggtgccgctggcttaaagcatgttgaagtccctgtgcctactccgaagaaggatgaggtcttgctaaaactggaggctacaagcttaaatcctgttgactggaaaattcagaagggcgtgcttcgtcctcttctgcctcccaagtttccttttattcctactactgacgtgggaggagaggttgtagaggtaggatctagtgtaaaagatttcaaggtcggcgacaaggttgtggctatgcttaataccctgaatggaggtggattggctgaatacgcggtggctaaggagagtttgactgttccaagaccagctgaagtatcagctgctgaaggtgcaggtcttcctgttgcaggagttacagctcttcaggcccttgtcaatcctgctgaggtcaagctcgatggaactggaccccggaagaacatcttagttacagctgcctctggtggtgtaggtcattatgctgtgcaactggcaaaacttggtaacacccatgttactgctacctgtggagcccgtaactttgattttgtgaagagcttaggagcagatgaggttcttgattacaagaccccagagggagcagctcttaagagtccatcaggccaaatatatgatgcagtaattcactgtactacaggcattccttggtctacctttgagcctaatttaagtgcgaaagggaaggtcatcgacctgactcctggacctagcgccatgtggacctatgcagtaaagaaactaaccttctcaaagaagcagttggtgccattgcttttaattcccaagaaggagaacctggacttggttgttagtcttgtgaaggaagggaaacttaaaacagtgatagactccaaacatcccctgagcaaggctgaagatgcttggagcaggagcattgatggacatgcaacaggaaagattattgtggagccatag

SEQ ID NO: 376 - protein, 329 aa, Nicotiana tabacum
MAGKVMHAIQYNSYGGGAAGLKHVEVPVPTPKKDEVLLKLEATSLNPVDWKIQKGVLRPLLPPKFPFIPTTDVGGEVVEVGSSVKDFKVGDKVVAMLNTLNGGGLAEYAVAKESLTVPRPAEVSAAEGAGLPVAGVTALQALVNPAEVKLDGTGPRKNILVTAASGGVGHYAVQLAKLGNTHVTATCGARNFDFVKSLGADEVLDYKTPEGAALKSPSGQIYDAVIHCTTGIPWSTFEPNLSAKGKVIDLTPGPSAMWTYAVKKLTFSKKQLVPLLLIPKKENLDLVVSLVKEGKLKTVIDSKHPLSKAEDAWSRSIDGHATGKIIVEP

SEQ ID NO: 377 - DNA, 954 bp, Oryza sativa
atgttctacaaactatgttatacatttctgtttcagtttgtggaaatccctgttccttcactcaagaagaatgaaattctcataaaaatagaagcagcaagcctcaaccaagctgattggaggattcagaaaggattgatgcgcccgtttcacccaaaattcccatttatcccagtaacggatgtttctggggaggtcattgaggttggctctgcgattcacgagttcaaagttggtgacaaagttgtctccaaacttaacctctggaaagcaggaggcctggcagagtacgtggcggcatcggagagcgacaccgtgtcccgccccgccggaatctccgccgccgacgcggcagggcttcccgtcgccggcctgacggctctccaggcgctgagctccatcggcaccaagttcgatggctcgggcaccggcgccgacgtgctgatcaccgcggcctccagcggtgtcggcacgtacgccgtccagctggccaagctcggcaaccaccgcgtcaccaccacgtgcggcgcacgcaatctggacctcgtcggcagcctcggcgccgacgaggtcctcgactacgccaccccggagggggccgcgctcgcgagcccctccggtaggaagtacgactacatcatcaacctcaccgaccgcggcaagtggtcggtgttcaggccgcagctgagcagcaacggtggcagggtcgtcgacgtgtcccccaacctcggcaacttcttggcgtcggtgatgacgctcttctcgcggaggaagaggctgtcgctggtgatcctgacgctggggaagaaggagctggggtttctcctcgagctgatgagggaagggaagctcaagacggtggtcgactcgcggcatccgttcgagaaggccgcggaggcgtgggagaggagcatgagcggccacgccaccgggaaggtcatcgtggagatgtaa

SEQ ID NO: 378 - protein, 317 aa, Oryza sativa
MFYKLCYTFLFQFVEIPVPSLKKNEILIKIEAASLNQADWRIQKGLMRPFHPKFPFIPVTDVSGEVIEVGSAIHEFKVGDKVVSKLNLWKAGGLAEYVAASESDTVSRPAGISAADAAGLPVAGLTALQALSSIGTKFDGSGTGADVLITAASSGVGTYAVQLAKLGNHRVTTTCGARNLDLVGSLGADEVLDYATPEGAALASPSGRKYDYIINLTDRGKWSVFRPQLSSNGGRVVDVSPNLGNFLASVMTLFSRRKRLSLVILTLGKKELGFLLELMREGKLKTVVDSRHPFEKAAEAWERSMSGHATGKVIVEM

SEQ ID NO: 379 - DNA, 999 bp, Oryza sativa
atggccgccggcgagaggccggcgaccatgcgcgccgtccagtacagtggctacggcggcggcgccgctgcccttaagtttgtggaaatccctgttccttctgtgaagaaggacgaagttctcgtaaaagtagaagctgcaagcatcaatcaatccgatttgatgactcagaaagggatgatgcgcccctttcacccgaaatttccatttattccagtaaataatgtgtccggagagatcgttgaggttggctctgcagtacgcgagttcaaagttggtgataaagttgtctccaaactagacttctggacagcagggggccttgctgagtacgtggccacatcggacaagctcaccgtcgctcgccctgccggaatctccgccgctgacgcggcgggtgtgcccgtcgccggcctgacagcgctccaggcgctcaaggccatcggcaccaagttcgacggctcgggcaccagcggcggcgccgacgttctgatcaccgcggcctccagcggcgtgggcacgtacgccgtccagctcgccaagctcggcaaccaccgcgtcaccgccacatgcggcgcgcgcaacctcggcctcgtcgctggcctcggcgccgacgaggtcctcgactacaagaccccggagggggccgcgctgtcgagcccctccggcaagaagtacgactacatcgtcaacatcagtaacaagaacaagtggtcggtgttcaagccgcgcctgagcagccatggcagggtcgtcgacgtcgcccccaacttcggcaacttcgtggcgtcggtggtgacgctgttctcccggaggaagaagctgtcgctggtgagcctgaagatgagcaaggaggacctggggttgctgctcgagctgatgcgggaagggaagctcaggacggtggtcgactcgcggcatccgttcgagaaggcggcggacgcatgggcgaggagcctcagcggccatgccactggaaaggtcatcgtggagatgtga

SEQ ID NO: 380 - protein, 332 aa, Oryza sativa
MAAGERPATMRAVQYSGYGGGAAALKFVEIPVPSVKKDEVLVKVEAASINQSDLMTQKGMMRPFHPKFPFIPVNNVSGEIVEVGSAVREFKVGDKVVSKLDFWTAGGLAEYVATSDKLTVARPAGISAADAAGVPVAGLTALQALKAIGTKFDGSGTSGGADVLITAASSGVGTYAVQLAKLGNHRVTATCGARNLGLVAGLGADEVLDYKTPEGAALSSPSGKKYDYIVNISNKNKWSVFKPRLSSHGRVVDVAPNFGNFVASVVTLFSRRKKLSLVSLKMSKEDLGLLLELMREGKLRTVVDSRHPFEKAADAWARSLSGHATGKVIVEM

SEQ ID NO: 381 - DNA, 1086 bp, Oryza sativa
atgactgcattcatctatcatcatcgattgacttgttcagacaacaggagaaattcaggaattgctcgggattatggccgccggcggcgggattccggccaccatgcgcgcggtgcagtacaccggctacggcggcggcgccggtgccctcaagtttcacttcagcacgtggaaatccctgttccttcggtgaagaaacatgaagttcttattaaagtcgaagctgcaagcgttaacccgattgattggagtattcagaaagggatgctacgcccatttcttcccaagtttccatttattccagtgactgatgttgccggggagattgtggaggctggttctgcagtacatgagctcaaagttggtgacaaagttttgtccaaactgaacttctggaaaggaggaggcctcgctgagtatgtcgctgcaccggagagcctcaccgtcgtccgccccgccggagtttccgccgtcgacgcggccgggctgccggtcgcaggcctcacagctctcaaggccctcatgtccatcgggaccaaattcgacggcaccggcggcaccggcgccaacgtgctgatcaccgctgcctccggcggcgtcggcacctacgccgtccagctcgccaagctcggcaaccaccgcgtcaccgccacctgcggcgcccgcaacatggacctcgtccgctccctcggcgccgacgaggtcctcgactacaataccccccaaggcgccgccctgacgagctcggcctccgacgagaagtacgactacatcatcaacaccgccatgaacgtcaactggtcggcgatgaagccgaccctgagcagccgtggtagggtggtggacataacaccaaaccccgggaactacgtcgcggcgatgctgaccatgtttgccaggaagaagataaccatgatggccctcatgtcgctggggaaggaggagatgaggtttctgatggagctcgtcggagaagggaagctcaggacggtggtcgactcgcggtgtccgttcgagaaggcggcggaggcgtgggagaagagcatgggcggccatgccacgggtaaggtcatcgtggagatgtga

SEQ ID NO: 382 - protein, 361 aa, Oryza sativa
MTAFIYHHRLTCSDNRRNSGIARDYGRRRRDSGHHARGAVHRLRRRRRCPQVSLQHVEIPVPSVKKHEVLIKVEAASVNPIDWSIQKGMLRPFLPKFPFIPVTDVAGEIVEAGSAVHELKVGDKVLSKLNFWKGGGLAEYVAAPESLTVVRPAGVSAVDAAGLPVAGLTALKALMSIGTKFDGTGGTGANVLITAASGGVGTYAVQLAKLGNHRVTATCGARNMDLVRSLGADEVLDYNTPQGAALTSSASDEKYDYIINTAMNVNWSAMKPTLSSRGRVVDITPNPGNYVAAMLTMFARKKITMMALMSLGKEEMRFLMELVGEGKLRTVVDSRCPFEKAAEAWEKSMGGHATGKVIVEM

SEQ ID NO: 383 - DNA, 1011 bp, Oryza sativa
atggccggagccgccgcgacgccgccggcgatgatgcgcgccgtgcagtacgacgccagcggcgggggagccgccgggctcaagcatgttgaagtcccggtcccttcggcaaagaagaacgaggtgctgttgaagctggaggcagcgaccatcaatccagttgactggaagattcagaaagggatgctgcgtcctctgctgcctcgtagactgccttttatcccagtgaccgatgttgcaggagtggttgctggtgttggtcccggagtgaatgatttcgcagtaggtgatcaagttgtcgctatgttgaacagtatgaacggaggtggattggcagagtacgccgtggcggcagcgaacctgaccgtcaagaggacacccaacgtctcagcggccgagggcgccgggctgcccatcgcggcgggcacggcgctgcaggcgctgaggtccatcggcgccaagttcgacggcaccggcgagccgctgaacgtgctggtcaccgccgcctcgggcggcgtgggcctctacgccgtgcagctggccaagctggcgaacctccacgtgacggccacctgcggcgcccgcaacgcggagctcgtgaggggcctgggcgccgacgaggtgctggactaccggacgcccgagggcgccgccatgcgcagcccctcggggaggaggtacgacggcgtcgtgcactgcaccgtcggcgtcgggtggccggcgttcgagccgctgatggcgccccgcgggaaggtgatcgacatcacgcccaacttctcagccatgctcacctcggcgctgcacgcggtgacgctgcggcggaagcggctggtgccgctgctgctgtcgccgaacaaggccgacctggagttcttggtcgggctggtgggggaagggaagctcaggacggtggtggactcgaggttcccgctgggcgacgcggcgaaggcgtggcagaagagcatcgacggccacgccaccggcaagatagtcgttgagatggaagggtga

SEQ ID NO: 384 - protein, 336 aa, Oryza sativa
MAGAAATPPAMMRAVQYDASGGGAAGLKHVEVPVPSAKKNEVLLKLEAATINPVDWKIQKGMLRPLLPRRLPFIPVTDVAGVVAGVGPGVNDFAVGDQVVAMLNSMNGGGLAEYAVAAANLTVKRTPNVSAAEGAGLPIAAGTALQALRSIGAKFDGTGEPLNVLVTAASGGVGLYAVQLAKLANLHVTATCGARNAELVRGLGADEVLDYRTPEGAAMRSPSGRRYDGVVHCTVGVGWPAFEPLMAPRGKVIDITPNFSAMLTSALHAVTLRRKRLVPLLLSPNKADLEFLVGLVGEGKLRTVVDSRFPLGDAAKAWQKSIDGHATGKIVVEMEG

SEQ ID NO: 385 - DNA, 1023 bp, Oryza sativa
atggccacttcttctcggaggatgcgcgccgtgcagtacgacaagtacggcggtggagctcaagcactcaagcatgtggaggtaccgatcccgacgccgaagaaaggcgaggtgctgatcaagatggaggccggcagcatcaaccaggtcgactggaagttccagaaaggtgtcgctcgcccgttcatgcccaacaagttccccttcatcccagtttatgatcttgccggagaggtcgtggagctgggccgcggcgtgagcagcttcaaggtcggcgacaaggtcatcgccatcaatttccctggcggcggcgggctcgccgagtacgcggtggcgcaggcgtcgcggacggcgccgcggccgccggaggtgtctgcggccgtgggcgcgtgcctgccgatcgccgccgtcacggcgctcgtggcgctgaggaccgccggtgtcagcttagacgccggcgacggcggcggcggcggcgccaagaagaacgtgctggtcaccgcggcgtccggcggcgtcggccacttcgcggtgcagctggcgagcgccgccgggcaccgcgtcacggcgacctgcggcgcgcgcaacgccggcctcgtcggcggcctcggcgccgacaaggtgctcgactacgccaccccggagggcgcggcgctgcggagcccctcggggcggaggtacgacgccgtggtgcactgcgcggcggtggcggggctcccgtggtccgcgttcgcgccggtgctcgccgacgccggcgtggtcgtcgacctcacgccgggcgccgcggccttcgccacggcgctgcggcagagggtgaccttctccaggaagaggctggtgccgctgttcgtgtcgccgacgaaggaggacatggagctcgtcgccggcatggtggcggaagggaagctcagggcggtgatcgagtcgaggcacccgctgagcagggcggaggagggctgggccaggagcatggcggggcacgccaccggcaagatcatcgtcgagatgggagacgaacagtga

SEQ ID NO: 386 - protein, 340 aa, Oryza sativa
MATSSRRMRAVQYDKYGGGAQALKHVEVPIPTPKKGEVLIKMEAGSINQVDWKFQKGVARPFMPNKFPFIPVYDLAGEVVELGRGVSSFKVGDKVIAINFPGGGGLAEYAVAQASRTAPRPPEVSAAVGACLPIAAVTALVALRTAGVSLDAGDGGGGGAKKNVLVTAASGGVGHFAVQLASAAGHRVTATCGARNAGLVGGLGADKVLDYATPEGAALRSPSGRRYDAVVHCAAVAGLPWSAFAPVLADAGVVVDLTPGAAAFATALRQRVTFSRKRLVPLFVSPTKEDMELVAGMVAEGKLRAVIESRHPLSRAEEGWARSMAGHATGKIIVEMGDEQ

SEQ ID NO: 387 - DNA, 996 bp, Oryza sativa
atggccacgacgccgtctcctcctccctccgcgacgacgatgcgcgccgtccagtacgacggctacggcggcggagccgaagggctcaagcatgtggaggtgccgatcccgtcgccgaagaaaggcgaggtgctgatcaagatggaggcggcgagcatcaaccccatcgactggaagattcagaaggggatgctccggccattcctgccatggaagttcccatcaattccagcgtgcgatctcgccggaaaagtcgcggcggtcggcggcggcgtgcgcaggttcgagctcggcgacaaggtcatcgccatcaatttcccgagtggcggcggcttcgccgagtacgcggtggcgcaggcgtcgctcacggtggagcggccgccggaggtgtccgcggcggagggcgcgtgcctgccgctcgcggcggtgaccgcgctgcaggcgctgagggccgcgggggccggcctggacgacgcgccgccgcccaagaacgtcctggtcaccgcggcgtccggcggcgtcggccacttcgcggtgcagctcgccaggctgggcggccaccgcgtcacggccacctgcggcgcgcgcaacctcgccctcgtcgccggcgagctcggcgccgacgaggcgctcgactacgccaccccggacggcgccgcgctccggagcccgtcgggcaggaggtacgacgccgtggtgcactgcgcgccgcacctcccctggcaggtgttcgaccgcgtcctcgccgaaggcgacaccggcggcgtcgtcgtcgacatcacgccttcccccgcggccttggccaccgcgctgctgcacagggtgaccttctccaagaagaggctgacgccgttcatgttctcgccgagcaaggcggacatggagctcctggtggccatggcgaggcaggggaagctcaagcccgccgtcgactcgtgccacccgctgagcgacgccaccggcaaggtcgtcgtcaaaatcggagaagaagaatga

SEQ ID NO: 388 - protein, 331 aa, Oryza sativa
MATTPSPPPSATTMRAVQYDGYGGGAEGLKHVEVPIPSPKKGEVLIKMEAASINPIDWKIQKGMLRPFLPWKFPSIPACDLAGKVAAVGGGVRRFELGDKVIAINFPSGGGFAEYAVAQASLTVERPPEVSAAEGACLPLAAVTALQALRAAGAGLDDAPPPKNVLVTAASGGVGHFAVQLARLGGHRVTATCGARNLALVAGELGADEALDYATPDGAALRSPSGRRYDAVVHCAPHLPWQVFDRVLAEGDTGGVVVDITPSPAALATALLHRVTFSKKRLTPFMFSPSKADMELLVAMARQGKLKPAVDSCHPLSDATGKVVVKIGEEE

SEQ ID NO: 389 - DNA, 1041 bp, Oryza sativa
atggctgccgctgccgacgctgctccaaagacgatgagagctgtgcagtacgataagtacggcggaggaccagaaggcctcaagcatgtggaagtgccgatcccggcgccgaaggaaggggagttgctgatcaagatggaggcggcgagcatcaaccccatcgactggaagattcagaaggggatgctccgcctcttcctgcccaagaaattccccttcattccagttggtgatctatccggcgaggtggtggagctcggcggcggcgtgagcggcttcaagccgggagacaaggtcgtttccatgagcttcccgaactgcggcgggctcgccgagtacgcggtggcgccggcgtcgctcacggtggcgaggccgcccgaggtgtccgcggccgatggcgccaccttgccggcggccgcgggctccgcgctccagcagctgaaggcggccggagtcaggttcgacgcggacgccgacgccgccgccgccgccggcggccccaagaacgtgctggtcaccgcggcgtcgggcggcgtgggccactacgccgttcagctcgccaagctcgccggcctccacgtcacggccacctgcggcgcccgcaacctcgccttcgtccgcgacggcctcggcgccgacgaggcgctcgactacaggacccccgacggcgccgcgctgcggagcccgtcgggcaggaggtacgacgcggtggcgcactgcgcgccgccggcgccgtggccggtgttcagggacgccctggccgacgccggcggcgtcgtggtcgacctcacgccgggggtcgccgccaccgtcaggtcgttcctgcacagggtgaccttctccaagaagaggctcgtgccgctgatcctgatgcccaagaaggaggagatggagtggctggtcgacatggccaagcaagggaagctcaagaccaccatagattccaagtaccctctgagcagagcacaggaggcttgggctaagagcatggaaggccatgccacgggcaagatcgttgtagaaatgggaggcacagaatga

SEQ ID NO: 390 - protein, 346 aa, Oryza sativa
MAAAADAAPKTMRAVQYDKYGGGPEGLKHVEVPIPAPKEGELLIKMEAASINPIDWKIQKGMLRLFLPKKFPFIPVGDLSGEVVELGGGVSGFKPGDKVVSMSFPNCGGLAEYAVAPASLTVARPPEVSAADGATLPAAAGSALQQLKAAGVRFDADADAAAAAGGPKNVLVTAASGGVGHYAVQLAKLAGLHVTATCGARNLAFVRDGLGADEALDYRTPDGAALRSPSGRRYDAVAHCAPPAPWPVFRDALADAGGVVVDLTPGVAATVRSFLHRVTFSKKRLVPLILMPKKEEMEWLVDMAKQGKLKTTIDSKYPLSRAQEAWAKSMEGHATGKIVVEMGGTE

SEQ ID NO: 391 - DNA, 1002 bp, Physcomitrella patens
atggcggctcagatgatgcgtgctgttcaatattcgacgttcggagggggcgctgctgcgcttcagcatgtggagatacccatgcccgtgccagctaaggaccagttgttgattaaagttgaagctgccagtgtgaatccggtagactggaaagtcattcaagcaggtctattcaagctttttcttcctgcaaagcttccttacataccaggcactgacatggcaggtgaagttgttggccttggtcctggagtgacatcttttgctgtcggcgacaaagtatcctgttggtcggatatccggaatgggggatcattagccgagtacgcagcagtgccaatcaaaactacagcgaagagaccagaaacagtgtcagcaattgatggtgcatccttcggtgtggctggtcaaactgctttgcaagctgtgcgtgattctgcaggaattaagcttgatgggagcagcaaagataagaatttgctcattacagcagcttccggaggtgtaggcacctatgctgttcagattgctaaactgggaggtgcacacgtgacagctacatgcggagctcgcaatgtcgccttgatcaaaagccttggggctgacgaagtgttagattacaaaacacccgagggagtaaaaatggagagtccatctggaagaaaatatgacgcagtcattcactgtgccaaataccaaccattctctgacttcaaaccgcagctcaaaaagaatggcaaagtgatcgacctcactccatccccaaaaggtcttcttgccacaggattccagcttgcaacgttctcgagccagagatttgtaccattcctgatgcgcggtaacagtgatgacctcgctgtgctgacaagtcttgtcaatgaggggaagctgaagaccgttgtggactccacttttcctctgtcgaaggccgaaaaagcttgggagaagcaaatagaggggcattcgacgggaaaagtattggttactatggttggtgagtaa

SEQ ID NO: 392 - protein, 333 aa, Physcomitrella patens
MAAQMMRAVQYSTFGGGAAALQHVEIPMPVPAKDQLLIKVEAASVNPVDWKVIQAGLFKLFLPAKLPYIPGTDMAGEVVGLGPGVTSFAVGDKVSCWSDIRNGGSLAEYAAVPIKTTAKRPETVSAIDGASFGVAGQTALQAVRDSAGIKLDGSSKDKNLLITAASGGVGTYAVQIAKLGGAHVTATCGARNVALIKSLGADEVLDYKTPEGVKMESPSGRKYDAVIHCAKYQPFSDFKPQLKKNGKVIDLTPSPKGLLATGFQLATFSSQRFVPFLMRGNSDDLAVLTSLVNEGKLKTVVDSTFPLSKAEKAWEKQIEGHSTGKVLVTMVGE

SEQ ID NO: 393 - DNA, 1005 bp, Physcomitrella patens
atggcggtggcggatgcttcccacatgatgaaagctgtgagctactccaaatatggcggcggtgcagacggtttgaaggatgtggagctgccgattcccagaccaaagagagaggagctcctggtgaaggtggaggcttgcagtatcaatcctattgactggaaagtccagaaaggtgccatgaagcctgttctgccttacagattccctcatgtaccaggcgcagatattacgggtgaggttgtgagcgtgggccctgcagtgacaaccttcgtacctggtgacaaaatcatcagttgcctcggcagggctggtggaggtttagcagaatacgctatagcgccaataacaaccactattaagagacgcaaagatgtgtcaccagtgcagggcgcagcgatgggcatctgtgcgtttgctgcgctccaaagcgttcgcaactcagcagggattaacatagaagagaaaaacaaaaaaagcaagaacttactcatcagagctgcagctgggggagtcggcacactagcggtgcaatttgccaagctgggaggtgcccatgtaaccgccacttgcagcccccacaacttcgggttgttgaaatctttgggagcagacgaagtcctggacttatacagtgcaaaggaggcagcgccgccaagcccctctggaaacaaatacgacgtggtgatcaactgtggtccacacaggccatttcctgattataaatcgcagctcgcacacaaagggtttgtgattgatttaactccctccccgactggaatagcaacaagcgctctgcacgccatttctctctccaagaagaagtatttccctttcgtgcatatccccaatcaggctgatatgtacgtcatttttaaccttcttcaccagaaaagaattaaaactgtcattgattcaacatatcctttggataaagcgagggaggcctgggttaagagcatggaaggccacgctgcagggaagattgtaatcaccatctcctaa

SEQ ID NO: 394 - protein, 334 aa, Physcomitrella patens
MAVADASHMMKAVSYSKYGGGADGLKDVELPIPRPKREELLVKVEACSINPIDWKVQKGAMKPVLPYRFPHVPGADITGEVVSVGPAVTTFVPGDKIISCLGRAGGGLAEYAIAPITTTIKRRKDVSPVQGAAMGICAFAALQSVRNSAGINIEEKNKKSKNLLIRAAAGGVGTLAVQFAKLGGAHVTATCSPHNFGLLKSLGADEVLDLYSAKEAAPPSPSGNKYDVVINCGPHRPFPDYKSQLAHKGFVIDLTPSPTGIATSALHAISLSKKKYFPFVHIPNQADMYVIFNLLHQKRIKTVIDSTYPLDKAREAWVKSMEGHAAGKIVITIS

SEQ ID NO: 395 - DNA, 993 bp, Physcomitrella patens
atgttcaatactccaggtaccacggcggcagcaaggctcttgaggcaatacgtggaggtgcccatcccgaagcccaaggccggtgagctgctgttgaaggttgaggcgatcagcaacaatccggtagaattacgcatccaggatgggttaatgaagcactttcttccacttagattcccattcgcccccggcactgatgttgcaggtgaggtcgtcagcttgggcaccggcgtcaagggattccgccccggtgacaaggtcgttgctcatatccatgttctgaaaggaggaggatatgcggagtacgcgatcgcgtcgtcatcaagagtggtgctgcgggtgccagaaatatcagcttccgaagctgcatcgatagtggtggctggttacacagcgcttcaaagtgcccggcaggtgggcatcaagagcctcgcaggcggatgcgagcacctcaatgttcagatcatcggcgcgtcgggaggcgtgggtaccatccttctgcagctggtgaagctatccggcgcgcatgtgacggtcacatgcagcgatcgcaacatcgagctcatgagaaacctgaaagccgacgaggtgctggactaccaaactcagcagggcgcaacctacaccagtccttcaggaagaagataccaccgcgtatttaattgcgcccactttgtacccttgtccaatttctcggcgcaactacaacccaatgcaagagtgatagacctgactcccacaaggcgcagcatcgtcgtggccatggttaacaaagtgtcgttgcggagtcctcacagattcgagaacttctacatgtgggataaccaggaagatctgcagacgatgatggagctgatgggggcagggaaagtgaaggcagtgctggataccaccttcccgctttgcaaagccggcgatgcgtgggatcactgcttgaagcggcgctgcgcgggtaaaatcatcttgtgctcatctccacccatttcatcgtga

SEQ ID NO: 396 - protein, 330 aa, Physcomitrella patens
MFNTPGTTAAARLLRQYVEVPIPKPKAGELLLKVEAISNNPVELRIQDGLMKHFLPLRFPFAPGTDVAGEVVSLGTGVKGFRPGDKVVAHIHVLKGGGYAEYAIASSSRVVLRVPEISASEAASIVVAGYTALQSARQVGIKSLAGGCEHLNVQIIGASGGVGTILLQLVKLSGAHVTVTCSDRNIELMRNLKADEVLDYQTQQGATYTSPSGRRYHRVFNCAHFVPLSNFSAQLQPNARVIDLTPTRRSIVVAMVNKVSLRSPHRFENFYMWDNQEDLQTMMELMGAGKVKAVLDTTFPLCKAGDAWDHCLKRRCAGKIILCSSPPISS

SEQ ID NO: 397 - DNA, 1026 bp, Physcomitrella patens
atggcgaagatgatgcacgcccaccagtactctaaatatcatggcggcccttctgccctcgagtatgtagaagtgccagtgccaacgcccaagaaaggcgacatgttggtgaaggtggaggccagcagtgtgaacattgtggactggaggattcaggacggcctgctgaagtatgtccttcctcgcaaattccctcacattccaggcactgatataagcggtgaggtggtgagcgttggatcaggagtcgagggcttcgcacctggcgacaagattctcagctggatcgatttactgagaggaggcggatttgctgagtacgctctggctcccgtaacatccactgtgaagcggcccccaagcatttctgctgtggatgcggcctcgttgccagtggctgcaatgactgccctccaaagtgccgtccatttgattggccttaagctagacggctcaggtcctaagttgaacattctcatcactgcggcttcgggtggggttggcatcttctggacacaggcacgggttgcacatggatgtgaaacatgtctgcagattgcgaagctttgtggttgtttcgtcacagccacatgtggagcgcgcaacatggagcttgtgagaagcttgggagccgacgaggtgttggattacaagacccccgagggggcgagcttcaagagtccctctgggaagaagtacgacgtggtggtgcaattggcaccttaccggccactggaggccttcaaggcccagctcacaaaacgaggcactgtcgtagatatgacccccaccttgaggactgtcctccggaattggtacaacaagatcacattctccaagcagagcttcttgccgtttgtgcttgatgcaaagaacactacggacttgcagtcggtcacagacttggtagagcaagggaagctgaaagtcatagtggactcgacgttcccactggccaaagccccagatgcatgggctcggagcatcgagggtcattccacaggaaaagtcgttttaatcgtgtga

SEQ ID NO: 398 - protein, 341 aa, Physcomitrella patens
MAKMMHAHQYSKYHGGPSALEYVEVPVPTPKKGDMLVKVEASSVNIVDWRIQDGLLKYVLPRKFPHIPGTDISGEVVSVGSGVEGFAPGDKILSWIDLLRGGGFAEYALAPVTSTVKRPPSISAVDAASLPVAAMTALQSAVHLIGLKLDGSGPKLNILITAASGGVGIFWTQARVAHGCETCLQIAKLCGCFVTATCGARNMELVRSLGADEVLDYKTPEGASFKSPSGKKYDVVVQLAPYRPLEAFKAQLTKRGTVVDMTPTLRTVLRNWYNKITFSKQSFLPFVLDAKNTTDLQSVTDLVEQGKLKVIVDSTFPLAKAPDAWARSIEGHSTGKVVLIV

SEQ ID NO: 399 - DNA, 1080 bp, Physcomitrella patens
atggcgtctcattctgtgttggatattcccaagacgatgaaagctgtccaatactcctgctatggtggcggtgcggaaggtttagagcatgtggagttgccagttcccaaaccgggcagagatgaggtgcttgttaaggtggaagcttgcagtatcaatcctattgattggaaagttcagaagggcgctatgaaacctgttctgccctacaagttcccacatgtaccaggtgcagacattgctgggatggtcgtcagtgtgggtcctgcagtgacaactttcgtacctggtgacaaagttgtgagctgtctgggcagggctggtggaggccttgccgaatatgcaatcgccccaatcagggtcacaataaaaagacggcatgaagttacaccaattcagggcgctgcgttgctgatcagtggatttactgctcttcaaagtgttcgtaactcggcagggattgacattgaaaggagatccactgaatctaaaaacatcctcattagagccgcatctggaggggtagggactttggctgtgcagattgcaaaactgggaggcgctcacgtgacagtgacttgcaaccccaacaacttcgaattgctcaaaagcttgggagcagacgaaacactgacctacgaagccttaaagggagctgccccagagagtcctaccggaaagaagtacgacgttgtgatcaactgtggtccgaatcgacccttccctcaatacaagttcctgctcgcacccgctggcttcgtgatcgacttaaacccgtcaccgaaaggcttcatgacaactgcgatacacgccttctcgctgtccaagcagaagtacttccctttcatgcacatccccaactgtgccgacatgtatctcctcttcaaccttctgcaccagaagaagatcagagttgtgatcgattcaacatatcctctggccaaagcacaggaagcttggagcagatgcatggagggagttgccgttgggaagattgtgatatctatctgtgaacctttgcagagtctagcaggccaccacacggtggtgacttcccctccaccgacaccgaagcattag

SEQ ID NO: 400 - protein, 359 aa, Physcomitrella patens
MASHSVLDIPKTMKAVQYSCYGGGAEGLEHVELPVPKPGRDEVLVKVEACSINPIDWKVQKGAMKPVLPYKFPHVPGADIAGMVVSVGPAVTTFVPGDKVVSCLGRAGGGLAEYAIAPIRVTIKRRHEVTPIQGAALLISGFTALQSVRNSAGIDIERRSTESKNILIRAASGGVGTLAVQIAKLGGAHVTVTCNPNNFELLKSLGADETLTYEALKGAAPESPTGKKYDVVINCGPNRPFPQYKFLLAPAGFVIDLNPSPKGFMTTAIHAFSLSKQKYFPFMHIPNCADMYLLFNLLHQKKIRVVIDSTYPLAKAQEAWSRCMEGVAVGKIVISICEPLQSLAGHHTVVTSPPPTPKH

SEQ ID NO: 401 - DNA, 1002 bp, Pinus taeda
atgcaaatggctggaaaactcatgaaggctgttcagtacagtggatacgggggaggtgctggcgctctccagtccgtggatgttccaatccccgctccaaagaaaggtgaattactgattaagttggaggcaactggtctgaatccggtagattggaaaatacaaaagggagtgattcgtcctttccttccaccaaaatttccttttatccctgcggtggatgtttctggtgaggttgtctcagtgggacctggggtcaatgattttactacaggtgacaaagttgtgagcatgcttagctcaagtagtggaggtggccttgctgaatatgctgttgcaccaatcaagacaactgcgaagagacctccaggggtttctgccgaaactgctgcagccttgcctatagctggtttaactgcattgcaagcagtccgggattctgcaggtgttaagcttgatggaagcgggaaggaaataaatctacttattacagctgcttcaggaggtgttggacattatgctgtgcagatagcaaagctgggtagagcacatgttactgccacttgtggagcccgcaatgttagcctagtgaaggaattaggagctgatgaagtcttggactacaagacaccagaaggtgcagccttaaagagtccctcagggcgcaagtacgatgctgtgattcattgtacctcaaatataccatggtcaatattccaacctaaccttagtcctaatgggaaagtgatagatctcactccaaattttatgtcattggctgccacttttgtaaagaaactgactctgtcaagacagcaaattgtgccattcatagtttcagggaacagcaaagacttggcgttaatggttaacttggtcaatgaaggaaaagtgaaaaccattatcgattcaaaatatcccgtggagaaggcagcagatgcatgggctaagagcatggacggtcatgccacaggaaagattgtagtaacatttggagagtag

SEQ ID NO: 402 - protein, 333 aa, Pinus taeda
MQMAGKLMKAVQYSGYGGGAGALQSVDVPIPAPKKGELLIKLEATGLNPVDWKIQKGVIRPFLPPKFPFIPAVDVSGEVVSVGPGVNDFTTGDKVVSMLSSSSGGGLAEYAVAPIKTTAKRPPGVSAETAAALPIAGLTALQAVRDSAGVKLDGSGKEINLLITAASGGVGHYAVQIAKLGRAHVTATCGARNVSLVKELGADEVLDYKTPEGAALKSPSGRKYDAVIHCTSNIPWSIFQPNLSPNGKVIDLTPNFMSLAATFVKKLTLSRQQIVPFIVSGNSKDLALMVNLVNEGKVKTIIDSKYPVEKAADAWAKSMDGHATGKIVVTFGE

SEQ ID NO: 403 - DNA, 1008 bp, Populus trichocarpa
atggcagggaagctgatgcatgccgttcagtatagcacctatggaggaggcgccgctggtttaaagcatgttgaggttccagtccctagtgccaagagagacgaggttttgctcaagttagaagcaactagtctaaacccagtcgactggaagatgcagaaagggttgctgcgccccctactccctcggagattcccttacatacccgaaacctttgtcgcaacaggcgctgatgtggcaggagaggttgtagaggttggaccaggagtaacaaatttcaaaactggtgacaaagttgtagctattctaagccacattagtggaggtggactagctgaatttgtagtggctaagaagagcttgccagttgcaaggccacctgaagtttcagcagctgaaggtgcaggcttgcctgttgctgggctcacagctcaccaggctgtcactcaatctgctggggtcaagcttgatggaagtggtaaccagaaaaatattctgatcactgctgcctcaggtggtgtaggtcactatgcagttcagcttgcaaagcttggaaacactcatgtgactgccacttgtggggctcgtaacatcgaatttgtgaagagcttaggtgctgatgaggttctggattacaaaaccccagaaggagcagctctgaagagcccatctggtaagaaatatgatgctgtgatccactgcgctgctggcattccttggagcacttttgagccaaatctgagtgcaaatgggaaggttatagatatcactcctggccccagtgccttcatggcttctgcttttaagaaacttactttctccaagaagcagctggtgccgctgcttttgattcccaatggtgagaacctgaattatcttgttaatctggtaaaggaagggaagcttaaaacagtcatcgactcaaagcatccattaagcagggctgaagatgcttgggcaaagattatcgatggtcatgctactgggaagatcattgtggagccgtga

SEQ ID NO: 404 - protein, 335 aa, Populus trichocarpa
MAGKLMHAVQYSTYGGGAAGLKHVEVPVPSAKRDEVLLKLEATSLNPVDWKMQKGLLRPLLPRRFPYIPETFVATGADVAGEVVEVGPGVTNFKTGDKVVAILSHISGGGLAEFVVAKKSLPVARPPEVSAAEGAGLPVAGLTAHQAVTQSAGVKLDGSGNQKNILITAASGGVGHYAVQLAKLGNTHVTATCGARNIEFVKSLGADEVLDYKTPEGAALKSPSGKKYDAVIHCAAGIPWSTFEPNLSANGKVIDITPGPSAFMASAFKKLTFSKKQLVPLLLIPNGENLNYLVNLVKEGKLKTVIDSKHPLSRAEDAWAKIIDGHATGKIIVEP

SEQ ID NO: 405 - DNA, 990 bp, Populus trichocarpa
atggcagggaagctaatgcatgccttgcagtatgatagctatggtggaggcgccgcaggtttaaagcatgttgaggttccagtgcctagtgccaagaaagacgaggttttgctcaagttagaagcaactagtctaaacccatatgattttagaatacagaagggcgtggtgcgcccttttctgcctagaagtttcccttacatccccggccttgatatagcaggagaggttgtggcggttggaccaggagttgaagatttcaaaactggtgacaaagttgtagctgtgcttagcggctctagtggaggtggactagctgaattcgcagtggctaagaagagcttgtcagttgcaaggccacctgaagtttcagcagctgaagctgcaggcttgcctattgcagggctcgcagcttacgaggctctcactcaatgtgctggggtcaagcttgatggaagtggcatccagaaaaatattctgatcactgctgcctcaggtggcgtgggtcactatgcagttcagctagcaaagctcggaaacacttatgtaactgccacttgtggggctcgtaacattgaatttgtcaaggacttgggggctgatgaggttctggattacaaaaccccagaaggagcagctttgaagagcccatctggtaagaaatatgatgctgtgatccactgcgcactaggaattccttggagtacttttgagccaaatctgagtgaaaacgggaaggttatacatctctctcctggccccagtgccatgattacttttgctgtgaagaaacttactttctccaagaagcagctgatgccgctgattattactcccaagggtgagaacctgaaatgtcttgttaatctggtaaaggaagggaagcttaaaacagtgatcgactcaaagcatccattaagcaaggctgaagatgcttgggctaagggtatcgatggtcatgccactgggaagataattgtggagccatga

SEQ ID NO: 406 - protein, 329 aa, Populus trichocarpa
MAGKLMHALQYDSYGGGAAGLKHVEVPVPSAKKDEVLLKLEATSLNPYDFRIQKGVVRPFLPRSFPYIPGLDIAGEVVAVGPGVEDFKTGDKVVAVLSGSSGGGLAEFAVAKKSLSVARPPEVSAAEAAGLPIAGLAAYEALTQCAGVKLDGSGIQKNILITAASGGVGHYAVQLAKLGNTYVTATCGARNIEFVKDLGADEVLDYKTPEGAALKSPSGKKYDAVIHCALGIPWSTFEPNLSENGKVIHLSPGPSAMITFAVKKLTFSKKQLMPLIITPKGENLKCLVNLVKEGKLKTVIDSKHPLSKAEDAWAKGIDGHATGKIIVEP

SEQ ID NO: 407 - DNA, 999 bp, Populus trichocarpa
atgggaatggcagggaagctcatgcatgccattcagtatgattcttatgatggaggacctgctgctttaaagcatgttgaagttccacttccaagtccccagaaatacgaggttttgttaaagctggaagcaaccagtctgaatccaattgattggaaaatccagaaaggcaagctgcggcctttttttcctcgcaaattcccttatatacctggtacggatgtggcaggcgaggttgtagaggttggagcagaagtaaagaacttcaaaattggtgacagagttgttgcagaacttggccatctttatggaggtggactagctgagtatgctgtagcaaaggagagcttgactgtggtgaggccagctgaagtttcagctgctgaaggcgcaggcttacttgtttcaggtatcacagcttaccaggctctcacacagcatggtgggatcaagcttgatggaagcgggcagcagaaaaacattctgatcactgctgcctcaggtggtgtaggtctttatgcagttcagctagcaaagcttggaaatacacacgtaacagccacttgtggtgctcgtaacatcgaattggtcaagagcttaggggccgatgaggttcttgattacaaaacacctgaaggagcagctctcaagagtccatctggtaagaaatatgatgttgtgctccactgtgcactgggcatttcttggtctacttttgaacctactttgagtgaaagtggtaaggttattgacatcactcctggcgctagtgccatgatgacttttgttctcaagaaacttaccttctccaagaaacagctggtgcccatattaaccgtaagccccagcattgagagcctggattgtcttattaaacttgtgaaggaagggaagcttaagacgatcatcgactccagacatccattaaggaaggcagaagatgcctgggcaaagagtatcgatggccatgctacagggaagattgttgtggaaacttga

SEQ ID NO: 408 - protein, 332 aa, Populus trichocarpa
MGMAGKLMHAIQYDSYDGGPAALKHVEVPLPSPQKYEVLLKLEATSLNPIDWKIQKGKLRPFFPRKFPYIPGTDVAGEVVEVGAEVKNFKIGDRVVAELGHLYGGGLAEYAVAKESLTVVRPAEVSAAEGAGLLVSGITAYQALTQHGGIKLDGSGQQKNILITAASGGVGLYAVQLAKLGNTHVTATCGARNIELVKSLGADEVLDYKTPEGAALKSPSGKKYDVVLHCALGISWSTFEPTLSESGKVIDITPGASAMMTFVLKKLTFSKKQLVPILTVSPSIESLDCLIKLVKEGKLKTIIDSRHPLRKAEDAWAKSIDGHATGKIVVET

SEQ ID NO: 409 - DNA, 999 bp, Poncirus trifoliata
atggcaggaaaggctcttatgcacgcggttcagtataattcttatggtggaggggccgctgatttgaagcatgttgaactgccggttcctaccccaagcaaagatgaggttttgcttaaacttgaagcaactgctctaaatccagttgattggaaaatccagaagggccagttacgcccttttttgcctcgcaggtttccttgcatacccgcaactgatgtagcaggagaggtcgtaggggtaggatcagaagttaaaattttcaaagctggtgacaaagttgtagcttttcttaactacctcgtaactaatggaggtggactagctgagtttgctgtggctaaggagagctcgacagttactaggccaccagaggtttcagcagctgaaggttctggcttacctgttgctggtctcactgctcaccaggcccttactcaatctgcaggtgtcaagcttgatggaagtgggcaacagaaaaacattctagtaactgctgcctcagggggtgtaggtcactatgctgttcagttggcgaagcttggaaacacacacgtgactgcctcttgtggggctcgcaacattgaattcgtcaagagtttaggggctgatgaggttcttgattacaagacacctgacggggcagctctaaagagtccatctggtcgaaaatacgatgcagtgatccactgtgcaacagggattccctggtctacttttgagcctaatctgggcacaaatgggaaggtgatagatatcactcctggccctagtgcgatgctgacttttgctttgaagaaacttaccttctccaaaaagcagctggtaccactgctgctgattcccaagcgtgagaacctagattttctagttaagttggtgaaggaaggaaagcttaagacagtaatcaactcaaagcatcccctgagcaaggcagaagatgcttgggctgagagtattgatggccatgctacagggaagatcattgtggagccataa

SEQ ID NO: 410 - protein, 332 aa, Poncirus trifoliata
MAGKALMHAVQYNSYGGGAADLKHVELPVPTPSKDEVLLKLEATALNPVDWKIQKGQLRPFLPRRFPCIPATDVAGEVVGVGSEVKIFKAGDKVVAFLNYLVTNGGGLAEFAVAKESSTVTRPPEVSAAEGSGLPVAGLTAHQALTQSAGVKLDGSGQQKNILVTAASGGVGHYAVQLAKLGNTHVTASCGARNIEFVKSLGADEVLDYKTPDGAALKSPSGRKYDAVIHCATGIPWSTFEPNLGTNGKVIDITPGPSAMLTFALKKLTFSKKQLVPLLLIPKRENLDFLVKLVKEGKLKTVINSKHPLSKAEDAWAESIDGHATGKIIVEP

SEQ ID NO: 411 - DNA, 1017 bp, Panicum virgatum
atggctactccgaagaagacgatgagagccctgcagtacgacaagtatggcggaggagcagaaggtctcaagcatgtggaggtgccggtcccgtcgccgaagaagggggaggtgctgctcaagctggaggcggccagcatcaaccctatcgactggaaaattcagaagggcatggtccggcccttccttcccaggaagttccccttcataccagttggagacatgtctggcgaagtcgtcgagctgggcagcggtgtgaccaacctcaaaccaggcgacaaggtcatctccatcagcttcccgaatggcggcgggctcgcggagtacgcggtggcgccggcgtcgcttacggtggcacggccgccggaggtgtccgcggccgaaggcgcctctctgccgacggccgcgtccaccgcgctccagcagctgaaggccgcgggcgtcagcagcttcgacgggtccggcggcggcagcaacggcccccggaacgtgctggtcaccgcggcctccggcggcgtcggccactacgccgtgcatctggccaagctggcggggctccacgtgacggccacctgcggcgcgcgcaacctgggcctcgtccggggcctgggcgctgacgaggcgctggactacaagacccccgagggcgccaggctgcggagcccctccggccggaagtacgacgcggtgatgcactgcgcgacgggcaccccgtggtcggtgttcgcgccggtgctggccggcgaggccacggtcgtcgacgtgacgcccgggatcgccgccgccgccaggtcgttcctgcagaaggtgacgctggccaagcagaggctggtgccgctgctcctggtgcccaggaaggaggagatggagtggctggcggacatgacgcggcaggggaagctcaggacggtggtcgattccaggtacccgttgagccgggcgcaggaggcgtgggccaagagcatcggagggcacgccaccggcaagatcgtcgtggaaatgggaggcgaggagtga

SEQ ID NO: 412 - protein, 338 aa, Panicum virgatum
MATPKKTMRALQYDKYGGGAEGLKHVEVPVPSPKKGEVLLKLEAASINPIDWKIQKGMVRPFLPRKFPFIPVGDMSGEVVELGSGVTNLKPGDKVISISFPNGGGLAEYAVAPASLTVARPPEVSAAEGASLPTAASTALQQLKAAGVSSFDGSGGGSNGPRNVLVTAASGGVGHYAVHLAKLAGLHVTATCGARNLGLVRGLGADEALDYKTPEGARLRSPSGRKYDAVMHCATGTPWSVFAPVLAGEATVVDVTPGIAAAARSFLQKVTLAKQRLVPLLLVPRKEEMEWLADMTRQGKLRTVVDSRYPLSRAQEAWAKSIGGHATGKIVVEMGGEE

SEQ ID NO: 413 - DNA, 993 bp, Panicum virgatum
atggccgccgcgacgatgcgggccgtgcagtacgacgcctgcggcgggggcgccgccgacctcaagcttgtggaacttcccgtccctgcggcaaagaagaatgagcttctgttgaagctggaggcagcaagcatcaatccggtggactggaagctacagaaagggatgctacgccctatcctgcctcgcaaactgccttttatcccagtgactgatgtggcaggagttgtggttgatgttggtccaggagtcaatggattccaggctggagatcaagttgttgccatgctgaactcattttatggaggtggacttgcggagtacgctgtggcatctgaaaatctgaccgtcaagaggcctcctgaggtgtccgctgctgaaggcgcagggctgcccatcgctgctggcactgcgctccaggctttgaggaccattggcgccaagttcgacggaactggggagcccttaaatgtgctgatcaccgctgcatccggtggtgtcgggctctatgctgtgcagctcgcaaagctggcaggtctccacatcactgccacctgtggcgcgcgcaatgtggagctggtgaagagccttggcgcggacgaggtgctcgactacaggacgccggagggcgccagcctgcagagcccgtcagggaagaagtacaatggcgtcgtccactgcacagtcgggataagctggtcgacgttcgagcctgtgctcgccaacaccggtagggtgattgacatcaccccgaacttcacagccatcctcaagtcggcgctgcacaaggtgacgtttgccaggaagcggctggtgcccctgctcctgtctcccaacaaggctgacctggagttcctggtcgggctgctgaagggcggcaagatgaagacgctgatcgactcaaggttctctctgagcgaagccagcaaggcttgggagaagagcatcgagggccacgccacaggcaagatcatcgtcgagatggaaggctga

SEQ ID NO: 414 - protein, 330 aa, Panicum virgatum
MAAATMRAVQYDACGGGAADLKLVELPVPAAKKNELLLKLEAASINPVDWKLQKGMLRPILPRKLPFIPVTDVAGVVVDVGPGVNGFQAGDQVVAMLNSFYGGGLAEYAVASENLTVKRPPEVSAAEGAGLPIAAGTALQALRTIGAKFDGTGEPLNVLITAASGGVGLYAVQLAKLAGLHITATCGARNVELVKSLGADEVLDYRTPEGASLQSPSGKKYNGVVHCTVGISWSTFEPVLANTGRVIDITPNFTAILKSALHKVTFARKRLVPLLLSPNKADLEFLVGLLKGGKMKTLIDSRFSLSEASKAWEKSIEGHATGKIIVEMEG

SEQ ID NO: 415 - DNA, 1014 bp, Phaseolus vulgaris
atgacaacgagaagcgcaaccaccactcccgatctcatgaacgcacttcactacgacgcctacggcggcggcgccgccggcctcaagcacgttcaagttggcgttcccactcccaagacaaatgaggttttgctgaaattggaagcaaccagcatcaaccccattgattggaagattcagaagggtcttctgcgccctttgtttttgcccagatcctttccccacattccttgcactgatgtcgctggagaaatcgttgagatcggaccgcaagtcaaagatttcaaagttggcgacaaagtccttactaagctcactcatcaatatggaggtggactggctgagtttgctgtcgccagtgagagcataacagcttccagaccacctgaagtctcagctgctgaagctgcagcattacctatagctgcactcacagctcgtgatgccctcacacaaattgcaggagtgaagcttgatgggagtggccagaccaggaacattttagtaactgctgcttcaggtggtgtgggtcactatgctgttcaactagcaaagctagggaacacccatgtcacagccacttgtggggctcgcaacattgagtttgtcaagggtttaggtgccgatgaggttcttgactacaggactccagagggggcagcgctcaagagtccatctggtaggaaatatgacgcagtcatacactgtacaactggaatatcttggtcaacttttgaacctaatttgactgaaaaggcagttgtagttgatttaacacctaatgcaagttcgttgtggactgctgccctgaagaaagttactttttccaagaagcggctggtgccatttgtagtaactgtccagcgtgagggcctggaacatctactccaactagtgaaggatgggaaacttaagtctgttattgactccaagtttcctttgagcaaagctgaagatgcttgggctaagagcattgatggccatgctactggaaaaatcgttgtggaaccatag

SEQ ID NO: 416 - protein, 337 aa, Phaseolus vulgaris
MTTRSATTTPDLMNALHYDAYGGGAAGLKHVQVGVPTPKTNEVLLKLEATSINPIDWKIQKGLLRPLFLPRSFPHIPCTDVAGEIVEIGPQVKDFKVGDKVLTKLTHQYGGGLAEFAVASESITASRPPEVSAAEAAALPIAALTARDALTQIAGVKLDGSGQTRNILVTAASGGVGHYAVQLAKLGNTHVTATCGARNIEFVKGLGADEVLDYRTPEGAALKSPSGRKYDAVIHCTTGISWSTFEPNLTEKAVVVDLTPNASSLWTAALKKVTFSKKRLVPFVVTVQREGLEHLLQLVKDGKLKSVIDSKFPLSKAEDAWAKSIDGHATGKIVVEP

SEQ ID NO: 417 - DNA, 990 bp, Ricinus communis
atggcggggaagtcaatgcacgcagttcaatacgataagtatggcggaggagctgctggtttaaagcatgctgaagttccagtccccagtccaaagaaagatgagatattggtaaaggtagaagccattagtataaatccagctgattggaaaattcaaaagggcatgttgcggcctttttttcctcgtagattccctttcattccttgtactgacgtggcaggagaggttatagtggttggatcaggagtcaaaaatttccaaactggtgacaaagttgtagtgcatctcggcttttctaatggaggtggactagctgaatttgttgtggctaaggagagcttgacagctgctaggccacctgaagtttcagcaactgaagggtcgaccttacctatggctggtctcacagcccaccaggctcttactcagtataccgggatcaagctcgatggaagtggcgagcaggcaaacatactggtcactgctgcctctggtggtgtgggtcactttgcagttcagctagcaaagcttgggaacacacatgtgacggccacttgtggagcccggaacattgaacttgtaaagagtttaggggctgatgaggttctcgattacaagactccagaaggggcagttctgaagagcccatctggtaggaagtatgatgtagttatccactgtgccacagggattccgtggagtacttttgagcctaacttgagtgaaaatgggaaggtggtagatctcacccctaatgctactgccgcaatgacgtttgctcttaagaaacttagtttctccaagaaacagctagtgccactgattctgactcccacagctgagaacctgaattatcttcttaaactgttgaaggaagggaagcttagggcaattattgagtcgaagcatcccttgagcaaggctgaagatgcttgggctaagagtattgacggccatgctactgggaagattgtcgtggagccttag

SEQ ID NO: 418 - protein, 329 aa, Ricinus communis
MAGKSMHAVQYDKYGGGAAGLKHAEVPVPSPKKDEILVKVEAISINPADWKIQKGMLRPFFPRRFPFIPCTDVAGEVIVVGSGVKNFQTGDKVVVHLGFSNGGGLAEFVVAKESLTAARPPEVSATEGSTLPMAGLTAHQALTQYTGIKLDGSGEQANILVTAASGGVGHFAVQLAKLGNTHVTATCGARNIELVKSLGADEVLDYKTPEGAVLKSPSGRKYDVVIHCATGIPWSTFEPNLSENGKVVDLTPNATAAMTFALKKLSFSKKQLVPLILTPTAENLNYLLKLLKEGKLRAIIESKHPLSKAEDAWAKSIDGHATGKIVVEP

SEQ ID NO: 419 - DNA, 1026 bp, Sorghum bicolor
atggctgcgccttccggtaccatgcgcgccgtgcagtacgacagatacggcggaggagcacaagggctcaagcaagtggaggtgccgatcccgtcgccgaagaaaggcgaggtgctcatcaggatggaggccaccagcatcaacgtcgtcgactgcaggtttaagaacggcatcgcgcggcccttcatgccctggaagttcccgtttatctctggtttcgatctagcaggcgaagtcgtggcgttgggcgctgcagtgagcggcttcaagccaggggacaaggttattgccatcaacttcccgaacggcggagggctcgctgagtacgcggtcgtgtcggcgtctcgcacagtcgcaaggccgcccgaggtgtcggccgtcgatggcgtctgcgtaccgatggccgcagtcaccgcgctcctggcactgcggagagccggggtcagcgtcagcctggacactactactactactactacgagacccaagaacgtgctggtcaccgcggcctccggcgccgtcggccacttcgccgtgcagctggcaaggatgggcggccacagcgtcacggccacctgcggcgcgcgcaacctcggcctggtccggagcctcggcgccgacgaggcgctggactacaagacccccgacggcgccaagctgcggagcccctccggcagggagtacgacgcggtggtgcactgcgccacggggttcccctggtcggtgttcaggcccgtgctcgccgccaagggcacggtcgtggacatcacgcccgggttcgtgtccggcgtcaccgcgatcctccagatgctcaccttctccaagaagaggctggtgccgctcttggcggcgtccaagaaggaggacatggagctgctgctgggcatgctggagcaggggaggctcaagccggtcatcgattcacggcatccgctgggcagtgctcacgaaggctgggccaagagcatgagcggccacgccaccggcaaggtcgtcgtagaaatcggagccgcgcagccagaatag

SEQ ID NO: 420 - protein, 341 aa, Sorghum bicolor
MAAPSGTMRAVQYDRYGGGAQGLKQVEVPIPSPKKGEVLIRMEATSINVVDCRFKNGIARPFMPWKFPFISGFDLAGEVVALGAAVSGFKPGDKVIAINFPNGGGLAEYAVVSASRTVARPPEVSAVDGVCVPMAAVTALLALRRAGVSVSLDTTTTTTTRPKNVLVTAASGAVGHFAVQLARMGGHSVTATCGARNLGLVRSLGADEALDYKTPDGAKLRSPSGREYDAVVHCATGFPWSVFRPVLAAKGTVVDITPGFVSGVTAILQMLTFSKKRLVPLLAASKKEDMELLLGMLEQGRLKPVIDSRHPLGSAHEGWAKSMSGHATGKVVVEIGAAQPE

SEQ ID NO: 421 - DNA, 1005 bp, Sorghum bicolor
atggctgctcccaagaagacgatgagagctctgcagtacgacaagtatggtggaggagctgaaggcctaaagcatgtggatgtgccggtcccatccccgaacaagggggaggtgctgctcaagctggaggcggccagcatcaaccccatcgactggaaaattcagaagggcatggtccgccccttcctgcccaggaagttccccttcataccagttggagacaggtccggcgaagtcgtggaggtagcagcgggtgacaaggtcatctccatcagcttcccgactggaggcgggctagctgagtacgcggtggcgccggcgtcgctgacagtggcacggccgccggaggtgtccgcggcggaaggcgcctctctgcccacggcggcgtccaccgcgctgcagcagctcaaggccgcgggtgtccgcagcttcaacggcggctccggctccggcgccgacagtaacgtccccaagaacgtgctggtcaccgcggcctccggcggcgtcggccactacgccgtgcagctggccaagctggcggggctccacgtcacggccacctgcggcgcgcgcaacctgggcttcgtcgcggggctgggcgccgacgaggtgctggactacaagacccccgagggcgccacgctgcggagcccgtccggcaccaggtacgacgcggtggcgcactgcgcgacgggcgccccgtggtcggtgttcgcgccggttctggccgacagggccacggtcgtcgacgtcacccccgggatcgccgccgcggccaagtcgttcctgcagaaggtgaccttcgccaagaagaggctggtgccgctggtcctgatccccaagaaggaggagatggagtggctggtggacatgacgaggcaggggaagctcaagacggtgatcgactccaggtacccgttgagcagagcgcaggaggcgtgggcgaagagcatcgaagggcacgccaccggcaagatcgttgtggaaatgggcggtgcagagtga

SEQ ID NO: 422 - protein, 334 aa, Sorghum bicolor
MAAPKKTMRALQYDKYGGGAEGLKHVDVPVPSPNKGEVLLKLEAASINPIDWKIQKGMVRPFLPRKFPFIPVGDRSGEVVEVAAGDKVISISFPTGGGLAEYAVAPASLTVARPPEVSAAEGASLPTAASTALQQLKAAGVRSFNGGSGSGADSNVPKNVLVTAASGGVGHYAVQLAKLAGLHVTATCGARNLGFVAGLGADEVLDYKTPEGATLRSPSGTRYDAVAHCATGAPWSVFAPVLADRATVVDVTPGIAAAAKSFLQKVTFAKKRLVPLVLIPKKEEMEWLVDMTRQGKLKTVIDSRYPLSRAQEAWAKSIEGHATGKIVVEMGGAE

SEQ ID NO: 423 - DNA, 1026 bp, Sorghum bicolor
atggccgtcgccgccgaccccatgaagacggccagcatccccgcgacgatgcgggccgtgcagtacgacgcctggggcgggggtgccacgggactcaagcatgtggaagttccaatcccttcggcccaaaagaatgagcttctattgaagctggaagtagcaagcatcaatccagtggactggaagatacagaaagggctcttgcggccattcctgcctcgtaaatttccttttatccctgtgactgatgtggcaggagttgtggctgatgttgggccaggagtccagggattccaacccggagatcaagtcgttgctaagctgtactcacttaaaggaggtggacttgcggagtatgctgtggcatcagaaactctgaccgtcaagaggcctgccgaggtatttgctgctgaaggcgcagggctgcctgttgctgctggtactgcgctccaggcgcttaggaccatcggcgccaagttcgacggcactggcaagcccttaaacgttctgatcaccgcggcatcaggtggcgtcggtcactacgccgtgcagctcgcgaaaatggccggtctccacatcaccgccacctgtggcgcgcgtaacgtggagctgctgaagagcctgggcgcggatgaggtgcttgactacaagacgccagagggtgccagcctgcagagcccctcgggtaagaagtacgatgttgtcatccattgcgctgcccggatcagctggtcgacgttcgagcctgtgctggccaccaccgggagggtgatcgacatcaccccaaacttcagctccatcctcaaatgggcgctgcacatggtgaccttcgccaggaagaggctggtgccactgcacctgtcgcccaacaaggcggacctagagttcctggtcgggctgctgaaggacggcaagctcaagacactgattgactcgaggttcccactgagcgaggtgagcaaggcctggcagaagagcgtcgacggccatgccaccggaaagatcatcgtcgagatcggaggctga

SEQ ID NO: 424 - protein, 341 aa, Sorghum bicolor
MAVAADPMKTASIPATMRAVQYDAWGGGATGLKHVEVPIPSAQKNELLLKLEVASINPVDWKIQKGLLRPFLPRKFPFIPVTDVAGVVADVGPGVQGFQPGDQVVAKLYSLKGGGLAEYAVASETLTVKRPAEVFAAEGAGLPVAAGTALQALRTIGAKFDGTGKPLNVLITAASGGVGHYAVQLAKMAGLHITATCGARNVELLKSLGADEVLDYKTPEGASLQSPSGKKYDVVIHCAARISWSTFEPVLATTGRVIDITPNFSSILKWALHMVTFARKRLVPLHLSPNKADLEFLVGLLKDGKLKTLIDSRFPLSEVSKAWQKSVDGHATGKIIVEIGG

SEQ ID NO: 425 - DNA, 1035 bp, Sorghum bicolor
atggctgatgctgccgccgccgccgcccccacgaagacagcgaacatcccgacgacgatgcgggccgtgcagtacgacgcctatggcgggggcgccacgggtctcaagcatgtggaagttcctgtccctatggccaaaaagaatgagcttctattgaaactggaagcagcaagcatcaatccagtggactggaagatacagaaagggttgttgcagccttttctgcctcgtaaatttccttttatcccagtgactgatgtggcaggagttgtggctgatgttggtccaggaatcaatggattccaagccggagatcaagttgttgctatgctcaactcacttaatggaggtggacttgctgagtatgctgtggcatcagaaaatctgaccgtcaagaggcctcccgaggtatctgctgctgaaggcgctgggctgcccattgccgctggtactgcgctccaggtgcttaggaccatcggcgccaagttcgatggtactggccagcccttaaacgttctgatcaccgcagcatcaggtggtgtgggtctctatgccgtgcagctcgcaaaactggctggtctccacatcactgccacctgtggcgcacgtaacgtagagctggtgaagagcttgggcgcggatgaggtgcttgactacaggacgccagagggtgccatcctgcagagcccctcaggtaagaagtacgatggcgtcgtccactgcactgtcgggatcagctggtcaacgttcgagcctgtgctggccaccaacgggagggtgatcgacatcactccaaacttcactgtgttcctcaaatcggcgctgcacaaggtgaccttcgccaagaagcggctggtgccgctgctcctgtcgcccaacaaggcagacctagagttcctggtcgggctgctgaaggacggcaacctcaagacgctgattgactcgaggttcccgctgagcgaggtgagcaaggcgtgggagaagagcatcgagggccatgctactggaaagatcattgtcgagatggtaggctaa

SEQ ID NO: 426 - protein, 344 aa, Sorghum bicolor
MADAAAAAAPTKTANIPTTMRAVQYDAYGGGATGLKHVEVPVPMAKKNELLLKLEAASINPVDWKIQKGLLQPFLPRKFPFIPVTDVAGVVADVGPGINGFQAGDQVVAMLNSLNGGGLAEYAVASENLTVKRPPEVSAAEGAGLPIAAGTALQVLRTIGAKFDGTGQPLNVLITAASGGVGLYAVQLAKLAGLHITATCGARNVELVKSLGADEVLDYRTPEGAILQSPSGKKYDGVVHCTVGISWSTFEPVLATNGRVIDITPNFTVFLKSALHKVTFAKKRLVPLLLSPNKADLEFLVGLLKDGNLKTLIDSRFPLSEVSKAWEKSIEGHATGKIIVEMVG

SEQ ID NO: 427 - DNA, 990 bp, Solanum lycopersicon
atgtctgggaagattatgcatgctgttcaataccactcttatggcggtggagctgctgccttgaagcatgtggaagttcctgtccctactccgaataaggatgaagtcttggtaaaagtggaggctacaagcataaatcctcttgactcgaaaattcagaagggcatgcttcgtccatttcttccttccaagtttccttttattcctactaccgacgtggcgggagaggttgttgaggtaggatctaatgtaaaaagtttcaaggctggtgacaaggttgtggctatgctcagtaccaagagtggaggtggattggctgaatatgtggtacctaaggatagtttgactgtttcaagacccgctgaagtatcagctgcagaaggtgcaggtcttgttatcgcaggtcttacagctcttcaggccctcgtcaatcctgctgaggttaagcttgatggaactggaccccggaagaacattctagttacggctgcttcgggtggtgtaggtcactatgctgttcaattggcaaaacttggtaacgcccatgttactgccacctgtggagcccgcaacattgattttgtgaagagcttaggagcagatgagattcttgattacaagactccagagggagctgctcttaagagtccatcaggccaaaaatatgatgcagtgattaactgcacaacaggcatcccttggtctacctttgagcctaatttaagttcaagtggaaaggtgatcgatctaactcctggagctagctccatgttgacctttgcagtaaagaaattaaccttctcaaagaagcagttggtgccatttcttgtaaatgccaataaggaaaacctggaattgcttgttaagcttgtgaaggaagggaagctcaaaacagtgattgactccaaatttcctctgagcaaggctgaagatgcttggagcaggagtatcgacggacatgcgacaggaaagattttggtggagccataa

SEQ ID NO: 428 - protein, 329 aa, Solanum lycopersicon
MSGKIMHAVQYHSYGGGAAALKHVEVPVPTPNKDEVLVKVEATSINPLDSKIQKGMLRPFLPSKFPFIPTTDVAGEVVEVGSNVKSFKAGDKVVAMLSTKSGGGLAEYVVPKDSLTVSRPAEVSAAEGAGLVIAGLTALQALVNPAEVKLDGTGPRKNILVTAASGGVGHYAVQLAKLGNAHVTATCGARNIDFVKSLGADEILDYKTPEGAALKSPSGQKYDAVINCTTGIPWSTFEPNLSSSGKVIDLTPGASSMLTFAVKKLTFSKKQLVPFLVNANKENLELLVKLVKEGKLKTVIDSKFPLSKAEDAWSRSIDGHATGKILVEP

SEQ ID NO: 429 - DNA, 981 bp, Solanum lycopersicon
atggctatgcatgctgttcaatacgactcttatggcagcggctccgctggattgaagcatgtggaagttcctgtgcctactccgaagaaggatgaagtcttgataaaagtggaggctacaagcataaatccttttgactggaaaattcagaagggcatgcttcgtccacttcttcctaccaagtttccttttattccttctatcgacgtgggaggagaggttgtagaggtaggatctaatgtaaaaagattcaaggctggtgacaaggttgtggctatgctcaatgccctgaatggaggtggattggctgaatatgcggtggctaatgagagtttgactgttccaagactcgctgaagtatcagctgcagaaggtgcaggtcttattgttgcaggtcttacagctcttcaggcccttgtcaatcattctgaggttaagctcaatggaactggaccccggaagaacattctagttacggctgcctcaggtggtgtcggtcactatgctgttcaattggcaaaacttggtaacactcatgttactgccacctgcggagtgcgcaacattgatcttgtgaagagcttaggagcagatgaggttcttgattacaataccccagagggagcagctcttaagagtccgtcaggccaaaaatatgatgcagtgattcactgcacaacaggcatcccttggtctacctttgagcctaatttaagttcaagtggaaaggttatagatataactcctggagttagcgccatgtggacctttgcggtgaagaaattgaccttctcaaagaaacagctggtgccactgcttctgattccgaagaaggaaaatctggaattgattgttgggcttgtgaaggaagggaaactgaaaacagtaatcgactcaaaatttcctctgagcaaggctgaagatgcttggagcaagagtattgatggacatgccaccggaaagattattgtggagccatag

SEQ ID NO: 430 - protein, 326 aa, Solanum lycopersicon
MAMHAVQYDSYGSGSAGLKHVEVPVPTPKKDEVLIKVEATSINPFDWKIQKGMLRPLLPTKFPFIPSIDVGGEVVEVGSNVKRFKAGDKVVAMLNALNGGGLAEYAVANESLTVPRLAEVSAAEGAGLIVAGLTALQALVNHSEVKLNGTGPRKNILVTAASGGVGHYAVQLAKLGNTHVTATCGVRNIDLVKSLGADEVLDYNTPEGAALKSPSGQKYDAVIHCTTGIPWSTFEPNLSSSGKVIDITPGVSAMWTFAVKKLTFSKKQLVPLLLIPKKENLELIVGLVKEGKLKTVIDSKFPLSKAEDAWSKSIDGHATGKIIVEP

SEQ ID NO: 431 - DNA, 990 bp, Solanum lycopersicon
atggctgggaagattatgcatgctgttcagtacgactcttatggcggtggagccgctgccttgaagcatgtggaagttcctgtcccaactccgaagaaggatgaggtcttgctaaaactcgaggctgcaagcataaatcctgttgactggaaaattcagaagggcgtgcttcgtccccttcttcctaccaagtttccttttattcctactaccgacgtgggaggagaggttgtagaggtaggatctaatgtaaaaagcttcaaggctggtgacaaggttgtggctatgctcaataccctgaatggaggtggattggctgaatatgcggtggctaatgagagtttgactgttccaagacccgctgaagtatcagctgcagaaggtgcaggtcttgttattgcaggtcttacagctcttcaggcctttgtcaatcctgctgaggttaagctcgatggaactggaccccggaagaacattctagttacggctgcttcgggtggtgtcggtcactatgctgttcaactggcaaaactttgtaacacccatgttactgccacctgtggagcgcgcaatattgattttgtgaagagcttaggagctgatgaggttcttgattacaagaccccagagggagcagctcttaagagtccgtcagggcaaaagtatgatgcagtgattcactgcacgacaggcatcccttggtctacctttgagcctaatttaagttcgagtggaaaggtggtcgatataactcctggagttaatgccatgtggacctttgcagtaaagaaattaaccttctcaaagaaacagttggtgccactgcttctgattccgaagaaggaaaacctggaattgattgttgggcttgtgaaggaagggaaacttaaaaccgtggtcgactccagatttcctctgagcaaggcagaagatgcttggagcaagagtattgatggacatgctaccggaaagattgttgtggagccatag

SEQ ID NO: 432 - protein, 329 aa, Solanum lycopersicon
MAGKIMHAVQYDSYGGGAAALKHVEVPVPTPKKDEVLLKLEAASINPVDWKIQKGVLRPLLPTKFPFIPTTDVGGEVVEVGSNVKSFKAGDKVVAMLNTLNGGGLAEYAVANESLTVPRPAEVSAAEGAGLVIAGLTALQAFVNPAEVKLDGTGPRKNILVTAASGGVGHYAVQLAKLCNTHVTATCGARNIDFVKSLGADEVLDYKTPEGAALKSPSGQKYDAVIHCTTGIPWSTFEPNLSSSGKVVDITPGVNAMWTFAVKKLTFSKKQLVPLLLIPKKENLELIVGLVKEGKLKTVVDSRFPLSKAEDAWSKSIDGHATGKIVVEP

SEQ ID NO: 433 - DNA, 999 bp, Selaginella moellendorffii
atgccggtcatacaatatgccaagtttggaggagatctggagagcggacatgcaccagttccctcgccgggacctggagagttacttgtaaaggtccaagctgcaagcctcaacccagtggactggaaaatccagcaaggaaagtataagaccctcaacattccagcccaattcccctatataccatgttcggatatcagcggcgaggttgtaagccttggtcctggtgtaactggtttcagtgttggagataaggttgtcagctgtctagaccacaagagaggaggtggccttgccaaatatgcttctgcagaggtgcggtttaccacaagaattccatctcaaatctcgccgattgaggcagctggccttccaatcgctggtcttacagccttgtacagcttgcaagaggccgcgggcatagcaataccaagcaaagactttcagggcaccattcttgtcactgcagcttcagggggagtgggaacatatgcggtgcagctcgcaaagctcactggtgctcatgtggtggctacatgcgggagccgcaacattgacctcatcaaaagcttaggtgctgatgaggttctcgactacaaaacacctcaaggggccaaactccagacctcctcttgctccaagtttgatgtcattatccactgcgcttaccatcgaccgccctggtccacctttgagcatgttcttactcgcaaggggattgtcgtggacatcaccccggctagcgaatctaccacaagcagcctcaaacgcaaatttgacaaggcagtgaagttgatcaccaggcaagaggcaatcggttccttggtccctttctatttgacccctcacacatcgggtatagaagctctcgtggacatgatgcaaaagggcaagttaaaaacaatcattgactcggtccatccgatttccaacgttacagctgcctggttcaagtgcacggaaggccatgccactggaaagattgttgtcactctgtaa

SEQ ID NO: 434 - protein, 332 aa, Selaginella moellendorffii
MPVIQYAKFGGDLESGHAPVPSPGPGELLVKVQAASLNPVDWKIQQGKYKTLNIPAQFPYIPCSDISGEVVSLGPGVTGFSVGDKVVSCLDHKRGGGLAKYASAEVRFTTRIPSQISPIEAAGLPIAGLTALYSLQEAAGIAIPSKDFQGTILVTAASGGVGTYAVQLAKLTGAHVVATCGSRNIDLIKSLGADEVLDYKTPQGAKLQTSSCSKFDVIIHCAYHRPPWSTFEHVLTRKGIVVDITPASESTTSSLKRKFDKAVKLITRQEAIGSLVPFYLTPHTSGIEALVDMMQKGKLKTIIDSVHPISNVTAAWFKCTEGHATGKIVVTL

SEQ ID NO: 435 - DNA, 996 bp, Selaginella moellendorffii
atgatggcggccttgcagtactccaagtacggcgaaggcgccgctggtctcaagcatgtggagatcccagtcccgacgcccaagaaggacgaaattctggtcaagatcgaagctgcagcgattaatcccgtggattggaagctccagaagggaatgctcaaggtcatctattctatcaaatttccatacataccttgcactgatgtgagtggagaagttgtgagcgttggtcccggcgtcactggattctcacagggagacaaagttatctcttggcttgatcttaagcgcggtggaggatttgcacagtatgctgtagctggaataaaatacacggccaagaggccatcaggagtttcggctgttgaggctgcgggtttgccagtggctggactcactgcgtatcaaagccttcgagactccggtggattgaagtatgatggatcttacaaaggaaacgttctcatcactgctgcctctggtggtgtgggtacttacgctgttcaactagcgaagcttgccggcgctcacgtcactgcaacctgcggtactcgaaacatcgatctcgtcaggagcttgggagcggacgaagttttggattacaagacaccggagggtgctgcgttgaagagtccatcggggaagaaatacgacgttgttcttcagtgcgcaactacaatgccatggtccactttccagcccgtgctttcttccaaaggcaaagtcatcgatctaaccccaaccttcggagtgatgctcaccagcgccttcaagttcctgacaatgtccaagcaaaagatggccatcttcgtgatgtcagcaaacgcgaaagatctgggagagctggccgagctcgtgaacgagaagaaggtgaagtcgttgatcgactcggagttcccgctggacaaggccgaggatgcttgggcgaagagcatcgaaagccatgccactggaaagatcgttgtgacaaacaaggacgaagctgcaagctactga

SEQ ID NO: 436 - protein, 331 aa, Selaginella moellendorffii
MMAALQYSKYGEGAAGLKHVEIPVPTPKKDEILVKIEAAAINPVDWKLQKGMLKVIYSIKFPYIPCTDVSGEVVSVGPGVTGFSQGDKVISWLDLKRGGGFAQYAVAGIKYTAKRPSGVSAVEAAGLPVAGLTAYQSLRDSGGLKYDGSYKGNVLITAASGGVGTYAVQLAKLAGAHVTATCGTRNIDLVRSLGADEVLDYKTPEGAALKSPSGKKYDVVLQCATTMPWSTFQPVLSSKGKVIDLTPTFGVMLTSAFKFLTMSKQKMAIFVMSANAKDLGELAELVNEKKVKSLIDSEFPLDKAEDAWAKSIESHATGKIVVTNKDEAASY

SEQ ID NO: 437 - DNA, 990 bp, Solanum tuberosum
atgactgggaagattatgcaggctgttcaatacgactcttatggcggtggagctgctgctttgaagcatgtggaagttcctgtgcctactccgaagaaggatgaagtcttggtaaaagtggaggctacaagcataaatcctcttgactgtaaaattcagaagggcatgtttcgtccacttcttcctcccaagtttccttttattcctgctaccgacgtggcgggagaggttgttgaggtaggatctaatgtaaaaagtttcaaggctggtgacaaggttgtggctatgcttagtaccaagagtggaggtggcttggctgaatatgcggtacctaaggagagtttgactgtttcaagacccgctgaagtatcagctgctgaaggtgcaggtcttcttattgcaggtcttacagctcttcaggcccttgtaaatcctgctgaggttaagctcgatggaactggaccccggaagaacattctagttacggctgcctcgggtggtgtcggtcactatgctgttcaattggcaaaacttggtaacgcccatgttactgccacctgtggagcccgcaactttgattttgtgaagagcttaggagcagatgagattcttgattacaagactccagagggagcagctcttaagagtccatcaggccaaaagtatgatgcagtgattaactgcacaacaggcatcccttggtctacgtttgagcctaatttaagttcgagtggaaaggtcatcgatctaactcctggagctagctccatgtggacctttgcagtaaagaaattaaccttctcaaagaagcagttggtgccatttcttataaatgccaagaaggaaaacctggaattgcttgttaggcttgtgaaggaagggaaactcaaaacagtgatcgactccaaatttcctctgagcaaggctgaagatgcttggagcaggagtattgatggacatgcgacgggaaagatttttgtggagccatag

SEQ ID NO: 438 - protein, 329 aa, Solanum tuberosum
MTGKIMQAVQYDSYGGGAAALKHVEVPVPTPKKDEVLVKVEATSINPLDCKIQKGMFRPLLPPKFPFIPATDVAGEVVEVGSNVKSFKAGDKVVAMLSTKSGGGLAEYAVPKESLTVSRPAEVSAAEGAGLLIAGLTALQALVNPAEVKLDGTGPRKNILVTAASGGVGHYAVQLAKLGNAHVTATCGARNFDFVKSLGADEILDYKTPEGAALKSPSGQKYDAVINCTTGIPWSTFEPNLSSSGKVIDLTPGASSMWTFAVKKLTFSKKQLVPFLINAKKENLELLVRLVKEGKLKTVIDSKFPLSKAEDAWSRSIDGHATGKIFVEP

SEQ ID NO: 439 - DNA, 993 bp, Solanum tuberosum
atgtcagggaagctaatgcgcgccgtgcagtacgactcttatggaggaggagctgatggattgaagcatgttgaagttccagtgcctactccgaacaatgatgaggtcttgataaagttggaggcaacaagtttaaatccattagacgtgagatttcagaaaggcgtggctcgtccttttgttcctcgcaaatttccctttataccatgtattgatgtagctggagaggttgtagaggttggatcaaatgttgtgaaatttaaggctggtgacaaagttgtggctcttcttaataccattattggaggtggattggcagagtatgcagttgcaaaggagagcttgactgttcaaaggccagaggaagtatcagctgctgaaggtgcaggccttccaattgctgctcttacagcacacaaagcccttgttgatattgctggaatcaagctagacggaagtggaccgcgtatgaatattcttgtcactgctgcctcgggtggtgttggacattatgctgttcaattggcaaagttgggtaatactcatgttaccgggacatgtggagctcgtaacattgaattcgtaaagagcttaggagcagatgaggttcttgactataaaacgccacaaggagcaactcttaagagtccatcaggaaaaaagtatgatgtagtggttcactgtactagagacattgcctggtcaacatttgagattaatttgagtgacacaggtaaggtcattgatcttactcctgggcctatttcaatgtgcacctatgtatggaagaaactgacattctccaaaaagcagttgttgccgttgattttgattcctaaagaagataaggaattgaaattgcttgttaagttggtgaaggaagggaagttaaagactatgtttgactctaaacatcctttgagcaaggctcaagatgcttgggctaagagccttgatggacatgccacaggaaagatcattgtggagatataa

SEQ ID NO: 440 - protein, 330 aa, Solanum tuberosum
MSGKLMRAVQYDSYGGGADGLKHVEVPVPTPNNDEVLIKLEATSLNPLDVRFQKGVARPFVPRKFPFIPCIDVAGEVVEVGSNVVKFKAGDKVVALLNTIIGGGLAEYAVAKESLTVQRPEEVSAAEGAGLPIAALTAHKALVDIAGIKLDGSGPRMNILVTAASGGVGHYAVQLAKLGNTHVTGTCGARNIEFVKSLGADEVLDYKTPQGATLKSPSGKKYDVVVHCTRDIAWSTFEINLSDTGKVIDLTPGPISMCTYVWKKLTFSKKQLLPLILIPKEDKELKLLVKLVKEGKLKTMFDSKHPLSKAQDAWAKSLDGHATGKIIVEI

SEQ ID NO: 441 - DNA, 1005 bp, Triticum monococcum
atggccaccccaaccacgacgccggcgacgatgcgggccgtgcagtacgacgcctgcggcggaggcgccgccggcctcaagcatgtagaagtccccgtcccttctgcaaagaagaatgaggtcctgctgaaactgcaagctgcaaccatcaacccagttgactggaagatacagaaaggggacttgaggcctctgctgcctcgtagactgccttttatcccagtgactgatgttgcaggagtagttgttgatgttggtcctggagtgaaaggtctcacagtgggtgatcaagtcgttgccatgttgaactcttttaacggaggtggactggcagagtatgctgtagcatccgcaaacctgaccgtcaaaaggccagctgaggtttctgcagctgagggtgctgggcttcccattgctgcaggcactgcgctccaggcactgaggtccattggtgccaagtttgacggcaccggcaagccattaaacgtgttggtcaccgctgcctctggcggcgtaggcctgtacccggtgcaacttgcaaagctaacgaacctctgttaccgccacctgcggggacgcaacatggatcttgtgaagagcttgggcgcagacgaggtgatggactacaggaccccagagggggcgagcctgcagagtccctccggcaggaagtacgacggcgtggttcactgcaccgtcggtgtcagctggtcgtctttccagccattgctcagtgatgccgggcgagtgatcgatatcacccccaacttctcggccatcctcacatctgcgctgcacaggatgacattttccaagaagcgcctggtgcccctgctcctgtcgcccaacaaggcggacctggagttcttggttgggttgctcaaggaaggcaagctgaagacggtggtcgactcgaagttcctgttgagcgaggcagacaaggcgtggcagagcagtatcgatggccatgccactggtaagattgtcgttgagatggagagctga

SEQ ID NO: 442 - protein, 334 aa, Triticum monococcum
MATPTTTPATMRAVQYDACGGGAAGLKHVEVPVPSAKKNEVLLKLQAATINPVDWKIQKGDLRPLLPRRLPFIPVTDVAGVVVDVGPGVKGLTVGDQVVAMLNSFNGGGLAEYAVASANLTVKRPAEVSAAEGAGLPIAAGTALQALRSIGAKFDGTGKPLNVLVTAASGGVGLYPVQLAKLTNLCYRHLRGRNMDLVKSLGADEVMDYRTPEGASLQSPSGRKYDGVVHCTVGVSWSSFQPLLSDAGRVIDITPNFSAILTSALHRMTFSKKRLVPLLLSPNKADLEFLVGLLKEGKLKTVVDSKFLLSEADKAWQSSIDGHATGKIVVEMES

SEQ ID NO: 443 - DNA, 988 bp, Triphysaria versicolor
atggccggaaagcttatgcgtgcggttcagtacgacggttatggcggtggagctgctggtttgaagcatgttgaagttccaatacctagtcctggcaagggcgaggtccttataaagcttgaagccataagcttaaatcaacttgattggaagcttcagaatggcatggttcgtccttttcttcctcggaaattcccttttatacctgctaccgacgtggctggggaggtggtccggatcggacaggatgtcaaaaactttaaacccggtgataaagttgttgctatgcttggcagttttggaggaggtggcttagccgaatacggcgtagcaagtgaaaagctaacagtccataggccgcccgaggtatcagctgccgagagctcaggccttcccattgccggccttacagcccacatggccctaacccaacacattggcctaaacctcgacaaaagtggtccccacaaaaacatcctcatcacagccgcctccggtggtgttggccaatacgccgttcagctcgcaaagctaggaaacacacatgtaaccgccacatgtgggtcccgaaactttgacttggtcaaaagcctcggagccgacgaggttattgactataaaactcccgaaggggcagcccttaagagcccgtcgggcaagaagtatgatgcggttattcattgtgcgtcgcctttgccatggtccgtttttaaaccgaacttgagcaaacatgggaaagtgattgatataactcccggtccgagggttatgttgacttcggctatgacaaaacttacgtgctcgaagaaacgattggtgacgttacttgttgtgatcaagggcgagcatttgagttatcttgttgagttaatgagagaagggaaacttaagaccgttatcgactctaagttttcgttgagcaaggctgaggaggcttgggctaagagtatcgacggccatgctaccggaaaaatcgttgtcgagccat

SEQ ID NO: 444 - protein, 329 aa, Triphysaria versicolor
MAGKLMRAVQYDGYGGGAAGLKHVEVPIPSPGKGEVLIKLEAISLNQLDWKLQNGMVRPFLPRKFPFIPATDVAGEVVRIGQDVKNFKPGDKVVAMLGSFGGGGLAEYGVASEKLTVHRPPEVSAAESSGLPIAGLTAHMALTQHIGLNLDKSGPHKNILITAASGGVGQYAVQLAKLGNTHVTATCGSRNFDLVKSLGADEVIDYKTPEGAALKSPSGKKYDAVIHCASPLPWSVFKPNLSKHGKVIDITPGPRVMLTSAMTKLTCSKKRLVTLLVVIKGEHLSYLVELMREGKLKTVIDSKFSLSKAEEAWAKSIDGHATGKIVVEP

SEQ ID NO: 445 - DNA, 990 bp, Vitis vinifera
atggctgccaagctcatgcgcgcggtttggtatagtggctatggcggcggagctgctgggctggagcatgttgaggttccagttccagctcctgctaaagatgaggttttgctgaaattggaagcagcaagcctaaatccaataaattggaaaatgcagaaaggcatgctgcgtcctctttttcctcgcaaattccctcacataccagttactgatgtggctggagaggtggtggaggttggatctggagtcaaagatttcaaagttggtgacaaagttgtttccatacttagccaatttagcggaggtggactagcagagtttgccgtggctaaagagaacttgacagtctcaaggcctgctgaagtgtcagcagctgaaggcgcaggcttgcccattgcaggtcttacagctcaccaggctctcacccaggtggtaggcatcaaccttgatggaagtggcccagagaaaaacatcctaatcacagctgcctcaggtggggtcggtcactatgctgttcaacttgcaaagctgggaaacacacatgttacagccacttgtggagcgcgaaacattgatttagtcaagagcttaggggctgatgaggttctggactacaagaccccagatggtgcagccctcaagagcccatctggtcggacatttgactttgtgatccactgtgcaacaggcattccctggtccaccttcgagcctaacttaagcacaaatgggaaggtaatagatatcactcctaccgccagtacgatgctgacttttgctctgaagaaactcactttctctaagaagcagctggtgcccttggttgtatctcccaagaaggagaacctggagtgtcttgttgggttggtgaaggaagggaagcttaagacagtgatcgactcgaaacatcccctgagcaaggctgaagatgcttgggccaagagcatcgatggccatgctactgggaagatcatcgtcgagccttaa

SEQ ID NO: 446 - protein, 329 aa, Vitis vinifera
MAAKLMRAVWYSGYGGGAAGLEHVEVPVPAPAKDEVLLKLEAASLNPINWKMQKGMLRPLFPRKFPHIPVTDVAGEVVEVGSGVKDFKVGDKVVSILSQFSGGGLAEFAVAKENLTVSRPAEVSAAEGAGLPIAGLTAHQALTQVVGINLDGSGPEKNILITAASGGVGHYAVQLAKLGNTHVTATCGARNIDLVKSLGADEVLDYKTPDGAALKSPSGRTFDFVIHCATGIPWSTFEPNLSTNGKVIDITPTASTMLTFALKKLTFSKKQLVPLVVSPKKENLECLVGLVKEGKLKTVIDSKHPLSKAEDAWAKSIDGHATGKIIVEP

SEQ ID NO: 447 - DNA, 996 bp, Zingiber officinale
atggcggcggaaaaaccaagcaccatgaaggctgtacagtacgattcctacggaggaggtgccgccggcctcaagcatgttgaggtgcctattccttcgcccaagaaaaacgaggctttgttgaagttggaggcagctgctataaacccagtagactggaaaatccagaaaggcatgctccgcccgtttctgccacccagatttccatttacccctgtttctgatgttgctggagaagttgtagaagtaggttctgaggtcaattcctttaagaagggggacaaagttgttggtctgctaagctttccaaatggtggcgggcttgccgagtttgctgtaacaacagtggctgcaatggccattaggccgcctgaggtttcactatctgaagctgcaggcctaccaacggcaggcctgactgctctccagtcactgaaggctattgggattaaatttgatactcccaacaagtcatccaatattctgataacagctgcctctggtggtgtggggcactatgctgtccagcttgccaagtatgcaggactccatgttacagcgacatgcggcgctcgcaatatagaactggtaaagagtctcggagcagatgaggtggtggactacaagactccagagggtgcgaaactgaagagcccatcagacaagaagtacgacggagtcatccattgcgccaccaatattccctggtccacttttgagcccaacttgagcagcagtggcaaggtcattgatataactcccaattttacaactatagctgcttccattctgaagaggatcacattttcaaagaaaaagcttataccactgatgttggtaccaaagtccggtgaaatggaattcttactcaatttggtaaaggaaggtaagctcaagacagttatagactccgtatatccattaagtaaagcagaagaggcctgggccaagagcatcagtggtcatgctacagggaagatcattatcgaaatatga

SEQ ID NO: 448 - protein, 331 aa, Zingiber officinale
MAAEKPSTMKAVQYDSYGGGAAGLKHVEVPIPSPKKNEALLKLEAAAINPVDWKIQKGMLRPFLPPRFPFTPVSDVAGEVVEVGSEVNSFKKGDKVVGLLSFPNGGGLAEFAVTTVAAMAIRPPEVSLSEAAGLPTAGLTALQSLKAIGIKFDTPNKSSNILITAASGGVGHYAVQLAKYAGLHVTATCGARNIELVKSLGADEVVDYKTPEGAKLKSPSDKKYDGVIHCATNIPWSTFEPNLSSSGKVIDITPNFTTIAASILKRITFSKKKLIPLMLVPKSGEMEFLLNLVKEGKLKTVIDSVYPLSKAEEAWAKSISGHATGKIIIEI

SEQ ID NO: 449 - DNA, 1026 bp, Zea mays
atggccgcaccttccggcacgatgcgcgccgtgcagtacgacagatacggcggaggagcacgggggctcaagcatgtggaggtgccgatcccgtcgccgaagaaaggcgaggtgctcatcaggatggaggccaccagcatcaacgtcgtcgactggaagttccagaacggcttcgcgcggcccttcatgcccaggaggttccctttcatctctggtttcgacctagcaggagaggtcgtagagttgggtgctggagtgagcagcttcaaaccaggggataaggtgatcgccatcaacttcccgaacggcggagggctcgccgagtacgcggtcgcgtcagcgtctcgtacagccgcaaggccgccggaggtgtcggccgtcgaaggtgtctgcgtgccgatcgccgcagtcaccgcgctcgggtcgctgcggacagccggggtcacagtcacactggacgacccggctcgcgcccccgccacgcccaagaacgtgctggtcaccgcggcctccggcgccgtcggccacttcgccgtgcagctcgccaggatgggcggccacaacgtcacggccacctgcggcgcgcgcaacctcggcctggtccggagcctcggcgccgacgaggcgctggactacaagacccccgagggcgccaagctgcggagcccctccggcaggaagtacgacgcggtggtgcactgcgccgcgaaggggctcccgtggtccgtgttcaggcccgtgctcgccgcctcgggcacggtcgtcgacatcacgccagggttcgtggccgtcgtcaccgcgatcctccaggtggcgaccttctccaagaagaggctggtgccgctcatagtgacgcccaagaaggaggagatggagctgctgctgggcatgctgaagcagggtaggctcaagacggtcatagattcccggcacccgctgggcagcgctcacgaaggctgggccaagagcatgagcggccacgccaccggcaaggtcgtcatagagatcggagccgcgcaaccataa

SEQ ID NO: 450 - protein, 341 aa, Zea mays
MAAPSGTMRAVQYDRYGGGARGLKHVEVPIPSPKKGEVLIRMEATSINVVDWKFQNGFARPFMPRRFPFISGFDLAGEVVELGAGVSSFKPGDKVIAINFPNGGGLAEYAVASASRTAARPPEVSAVEGVCVPIAAVTALGSLRTAGVTVTLDDPARAPATPKNVLVTAASGAVGHFAVQLARMGGHNVTATCGARNLGLVRSLGADEALDYKTPEGAKLRSPSGRKYDAVVHCAAKGLPWSVFRPVLAASGTVVDITPGFVAVVTAILQVATFSKKRLVPLIVTPKKEEMELLLGMLKQGRLKTVIDSRHPLGSAHEGWAKSMSGHATGKVVIEIGAAQP

SEQ ID NO: 451 - DNA, 1041 bp, Zea mays
atggctgctcccaagaagacgatgagagctctgcggtacgacaagtatggtggaggagctgaaggcctaaagcatgtggaagtgccggtcccatccccgagcaagggggaggtgctgctcaagctggaggcggccagcatcaaccccatcgactggaaaattcagaagggcatggtccggcccttcctgcctaggaagttccccttcataccagttggagacatgtctggcgaagtggtagagctaggcagcggtgtgaccgacttcaagccaggtgacaaggtcatctccatcagtttcccgaatggaggcgggctagccgagtacgcggtggcgccggcgtcgctcacagtggcacggccgccggaggtgtccgcggcggaaggcgcgtctctgcccacggccgcgtccaccgcgctgcagcagctcaaggccgcgggggtaagcagcttcgacggcggctccggctccggctccggctctggcgccgacagtgacggccccaagaacgtgctggtcaccgcggcctccggcggcgtgggccactacgccgtacagctggccaagctggcggggctccgcgtcacggccacctgcggcgcgcgcaacctgggcctcgtcgcgggcctgggcgccgacgaggtgctggactacaagacccccgagggcgccaggctgctgagcccgtcgggcaccaggtacgacgcggtggcgcactgcgcgactggcaccccctggtcggtgttcgcgccggttctggccgacagggccacggtcgtcgacgtcaccccgggggtcgccgccgcggccaagtcgttccttcagaaggtcaccttctccaggaagaggctggtgccgctggtcctgatccccaagaaggaggagatggagtggctggtggagatgaccaggcaagggaagctcaggacggtggtcgactccaggtactcgttgagcagagcgcaggaggtgtgggccaagagcatcgatgggcatgccaccggcaagatcgtcgtggaaatgggcggtgctgcagagtga

SEQ ID NO: 452 - protein, 346 aa, Zea mays
MAAPKKTMRALRYDKYGGGAEGLKHVEVPVPSPSKGEVLLKLEAASINPIDWKIQKGMVRPFLPRKFPFIPVGDMSGEVVELGSGVTDFKPGDKVISISFPNGGGLAEYAVAPASLTVARPPEVSAAEGASLPTAASTALQQLKAAGVSSFDGGSGSGSGSGADSDGPKNVLVTAASGGVGHYAVQLAKLAGLRVTATCGARNLGLVAGLGADEVLDYKTPEGARLLSPSGTRYDAVAHCATGTPWSVFAPVLADRATVVDVTPGVAAAAKSFLQKVTFSRKRLVPLVLIPKKEEMEWLVEMTRQGKLRTVVDSRYSLSRAQEVWAKSIDGHATGKIVVEMGGAAE

SEQ ID NO: 453 - DNA, 1020 bp, Zea mays
atggccgccgcctccacgaagacggcgaacatccccgcgacgatgcgggccgtgcagtacgactcctgcggcgggggcgccgctggactcaagcatgtggaagttccggtcccttcggcgaaaaagaacgagcttctgctgaagctggaggcagcaagcatcaacccagtggactggaaggtgcagaaaggcatgctgaggcctttcctgcctcgtaaattaccttttatcccagtgactgatgtggcaggagtcgtggctgatgttggtccaggaatcaatgggttccaagccggagatcaagttgttgctatgctcaactcatttaacggaggtgggcttgcggagtatgctgtggcatcagaaaatctgaccgtcaagaggcctcctgaggtatctgctgccgaaggcgcagggctgcccatcgccgccggcactgccctccaggcgctcaggaccatcggcgccaagttcgacggtactggaaagcccatgaacgttctggtcaccgcggcatcaggtggcgtcggcctctacgccgtgcagctcgcgaaacgggctggtctccacgtcactgccacctgcggcgcgcgtaacgtagagctggtgaagagcctgggcgccgacgaggtgcttgactacaggacgccggagggtgccaccctgcagagcccctcgggcaagaagtacgatggcgtcgtccactgcactgtcgggaccagctggtcgacgttcgagcctgtgctggccgccacggggaaggtgatcgacatcaccccgaacttgactgccatcctcaaatcggcgctgcacagtgtgaccttcgccaggaagcggctcgtgccactgctcctgtcgcccaacaaggcggacctagagttcctggtcgggctgctgaaggacggcaaactcgagacgctgatcgactcgaggttcccgctgagcgaggtgagcaaggcgtgggagaagagcatcgagggccatgccactggaaagatcattgtcgagatgggagactga

SEQ ID NO: 454 - protein, 339 aa, Zea mays
MAAASTKTANIPATMRAVQYDSCGGGAAGLKHVEVPVPSAKKNELLLKLEAASINPVDWKVQKGMLRPFLPRKLPFIPVTDVAGVVADVGPGINGFQAGDQVVAMLNSFNGGGLAEYAVASENLTVKRPPEVSAAEGAGLPIAAGTALQALRTIGAKFDGTGKPMNVLVTAASGGVGLYAVQLAKRAGLHVTATCGARNVELVKSLGADEVLDYRTPEGATLQSPSGKKYDGVVHCTVGTSWSTFEPVLAATGKVIDITPNLTAILKSALHSVTFARKRLVPLLLSPNKADLEFLVGLLKDGKLETLIDSRFPLSEVSKAWEKSIEGHATGKIIVEMGD

SEQ ID NO: 455 - DNA, 612 bp, Triticum monococcum
atggcggtcaaggtctatgtcgtgtactactccatgtatggacatgtcgctaaactagctgatgagataaagaaaggtgtgtcgtcagttgaaggcgtcgaagctaaaatatggcaggtccctgaaactctccccgaggaagtacttggaaagatgggtgcacctcccaagcttgatgccccaatcatcacaccacaagaacttgcggaggcagatgggatcctctttggttttcctacaaggtttggcatgatggctgcacaaatgaaggcattctttgatgcaactggtggcctgtggagggagcagagtcttgcaggcaaacctgcaggcattttcttcagcaccggtactcagggtggcgggcaggagactacagcattgacaacggtaacccagttgactcaccacggcatggtgttcgttcccgtcgggtacaccttcggtgccaagctgttcgacatggacaaagttcagggtggcagcccgtacggcgcaggcacatttgccgccgatggttcgaggtggccatctgagatggagctggagcacgccttccaccagggccagtactttgcgagcatcgcgaagaaactcaagggatctgcttga

SEQ ID NO: 456 - protein, 203 aa, Triticum monococcum
MAVKVYVVYYSMYGHVAKLADEIKKGVSSVEGVEAKIWQVPETLPEEVLGKMGAPPKLDAPIITPQELAEADGILFGFPTRFGMMAAQMKAFFDATGGLWREQSLAGKPAGIFFSTGTQGGGQETTALTTVTQLTHHGMVFVPVGYTFGAKLFDMDKVQGGSPYGAGTFAADGSRWPSEMELEHAFHQGQYFASIAKKLKGSA

SEQ ID NO: 457 - DNA, 618 bp, Triphysaria versicolor
atggcaaccaaagtctacatcgtttactattcgacatacggacatgttgagcggctagcgcaagagatcaagaaaggagctgagtctgtcggaaatgttgaggttaaactatggcaggttcctgaaattctgtcggatgaggttcttgggaagatgtgggccccaccaaagagcgatgtgccggtgatcacacccgatgagctcgtcgaggctgatggtatcatatttggtttcccaacgaggtttggaatgatggccgctcaatttaaagccttcttcgattcaaccggaggtttatggaagactcaagcacttgccggcaagccggctggcatctttttcagcactggaactcaaggcggcggtcaagaaactaccgcattaacagccattacacagttgacacatcatggtatgatctatgtccccattggctatacatttggagctgacatgtttaatatggagaagatcaagggtggtagcccatatggcgctggcacgttcgccggagcagatggatctagacagccttcggacatcgaactcaaacaagcttttcaccagggaatgtacatcgccggcatcacaaagaagatcaagcaaacatcggcctaa

SEQ ID NO: 458 - protein, 205 aa, Triphysaria versicolor
MATKVYIVYYSTYGHVERLAQEIKKGAESVGNVEVKLWQVPEILSDEVLGKMWAPPKSDVPVITPDELVEADGIIFGFPTRFGMMAAQFKAFFDSTGGLWKTQALAGKPAGIFFSTGTQGGGQETTALTAITQLTHHGMIYVPIGYTFGADMFNMEKIKGGSPYGAGTFAGADGSRQPSDIELKQAFHQGMYIAGITKKIKQTSA

SEQ ID NO: 459 - DNA, 1161 bp, Arabidopsis lyrata
atgaacacagcgcttgcaacgaccaccgccacaactcctatactccgccgtgatacgcctcttcttcatcattgttctctcacagcaaaatcgccggttttccgattaaacggagttagattcggatcttgcgtgcaaacagtcagcaagaagttcttgagaatctctgcgagctctcagagtacttcagcggcggtcaatgtcacggcggatgcgtcgattccgaaagagatgaaggcgtgggtgtatagtgagtacggcggagttgatgttttgaagctggagagtgacatcgctgtgccggaggttaaagaagatcaggttttgattaaagttgttgcggcggctcttaatcccgttgacgctaagagacggcaagggaaatttaaagccaccgattcgcctctaccgactgttccgggatacgacgttgccggagtagtggtgaaagttggtgctgcggtgaaggatttcaaagaaggagatgaagtttacgctaacgtgagcgagaaagcattggaaggtccgaagcaattcggttctttaggggagtacacggccgtggaagagaagttattagctttaaaacctaaaaacatcgatttcgcgcaagctgcagggcttccgttggcaatagaaaccgctgatgaaggtctagttaggactgaattctcagccggaaagtcaattcttgttcttaatggtgctggaggagtagggagccttgtgatccagttggcgaagcacgtgtatggagcttcaaaagtggctgcaacagcgagtacagggaagctagagctggtgagaagcttaggtgctgatttagctattgattacacaaaggagaacatagaagacttgcctgacaagtacgacgttgtctttgacgccattgggatgtgtgataaggcagtgaaggtgattaaggaaggagggaaagttgtggccttgaccggagctgtcacgcctcccggtttcagatttgttgtgacatctaacggcgatgttttgaagaaacttaacccatacattgagagtggggaggtgaagcctgtggtcgatcccaaaggaccattcccattctcacgtgtcgctgatgctttctcatacttagaaacaaaccatgccacagggaaggtcgttgtttatcccatcccttga

SEQ ID NO: 460 - protein, 386 aa, Arabidopsis lyrata
MNTALATTTATTPILRRDTPLLHHCSLTAKSPVFRLNGVRFGSCVQTVSKKFLRISASSQSTSAAVNVTADASIPKEMKAWVYSEYGGVDVLKLESDIAVPEVKEDQVLIKVVAAALNPVDAKRRQGKFKATDSPLPTVPGYDVAGVVVKVGAAVKDFKEGDEVYANVSEKALEGPKQFGSLGEYTAVEEKLLALKPKNIDFAQAAGLPLAIETADEGLVRTEFSAGKSILVLNGAGGVGSLVIQLAKHVYGASKVAATASTGKLELVRSLGADLAIDYTKENIEDLPDKYDVVFDAIGMCDKAVKVIKEGGKVVALTGAVTPPGFRFVVTSNGDVLKKLNPYIESGEVKPVVDPKGPFPFSRVADAFSYLETNHATGKVVVYPIP

SEQ ID NO: 461 - DNA, 1101 bp, Arabidopsis lyrata
atgcgagtgatgagatcattgcgcggtaattccggtgcaggattgatttcccggccggcgaggttaagttctcttcggagcgtttttaccggttgccgtgctgtgatgttaccccgctttggcggtccggaggtttttgagctccgggagaatgttccggtgccgaatctgaatccaaatgaggttcttgtccgagcgaaagctgtttccgtcaatcctcttgattgcagaatacgagctggatatggacgttctgtattccaaccgcatctacctattatagttggacgcgatatcagtggtgaagttgcggcaattgggacttcagtaaagtcacttaaagttggacaagaagtttttggtgcgttgcatcctacggcgttgagaggtacttatactgactatggaattctttcggaagacgaactcacggaaaagccatcatctgtttcacatgtggtagcaagtgccattccttttgcagctttgactgcttgccgtgctttgaagagtaatgctcggataactgaaggacaaaggctcttagtctttggaggaggaggagcagtaggtttttctgcaatccagcttgcggtagcatctgggtgccatgttacggcctcttgtgtgggtcagactaaagacagaatacttgcagctggtgccgagcaagctgttgactacacaaccgaggacattgagttggcggtaaaaggaaaatttgatgctgtgttggacactattggtgggcctgaaacagagagaataggcattaacttcttaaggaagggtggaaactatatgactctccagggtgaggctgcatcgttgactgataaatacggttttgtggttgggcttccccttgcaacatcactcttgatgaagaaaaagatacaatatcagtattctcatggaatagactattggtggacgtatatgagggctgatcctgaaggtctagccgagattcagcggttagttggagccggaaagctaaagatacctgtcgaaaaaactttttcaataaccgatgttgttgcagctcatgaagccaaggagaagaagcagattccgggtaaggtggttctagagttctga

SEQ ID NO: 462 - protein, 366 aa, Arabidopsis lyrata
MRVMRSLRGNSGAGLISRPARLSSLRSVFTGCRAVMLPRFGGPEVFELRENVPVPNLNPNEVLVRAKAVSVNPLDCRIRAGYGRSVFQPHLPIIVGRDISGEVAAIGTSVKSLKVGQEVFGALHPTALRGTYTDYGILSEDELTEKPSSVSHVVASAIPFAALTACRALKSNARITEGQRLLVFGGGGAVGFSAIQLAVASGCHVTASCVGQTKDRILAAGAEQAVDYTTEDIELAVKGKFDAVLDTIGGPETERIGINFLRKGGNYMTLQGEAASLTDKYGFVVGLPLATSLLMKKKIQYQYSHGIDYWWTYMRADPEGLAEIQRLVGAGKLKIPVEKTFSITDVVAAHEAKEKKQIPGKVVLEF

SEQ ID NO: 463 - DNA, 978 bp, Arabidopsis lyrata
atgaaagcgatcgtgatctcggagccaggtaagccagaggttctgcaactgcgtgatgtggcagacccagaagtcaaggacgatgaggttctcgtcagagttctcgccactgctttgaatcgtgccgatactctccaaagacttggcctttacaatccaccacctggctcaagcccttaccttggtctcgagtgttctggaaccattgaatctgttggcaaaaacgtctctcgatggaaggttggagaccaggtgtgtgctcttctttctggaggaggttatgcagagaaagtctctgttcctgctggacaaattttcccagtacccgctggtatctctcttaaagatgcaacggctttccctgaagtggcatgcactgtttggtctactgtcttcatgatgggccgtctctccgctggtgaatcattcttggttcatggaggttcaagtgggattgggacttttgcaattcagatagctaaacatctaggagtgagagtatttgtaacagcagggaatgaggaaaagctagctgcctgcaaagaactcggggctgatgtttgtataaattacaaaaccgaggactttgtcgcaaaggtaaaagcggaaactgatgggaaaggtgtggatgttatcttggactgcattggggcaccgtatttgcagaaaaacctcgacagcttaaatttcgatggtaggttatgtattatcggattaatgggaggagccaatgcagaaataaaactaagtagtctgcttccaaagcgtctcactgtcttaggagctgcattaagaccgagaagccctgaaaacaaagcggttgttgtagcagaagtcgagaagaatgtgtggccagcgatagaagcggggaaggtaaaaccggtgattcacaagtatttaccattgtcacaagcagcagaagctcatagccttatggagagtagcaaacacattggtaagattctgcttgagacctga

SEQ ID NO: 464 - protein, 325 aa, Arabidopsis lyrata
MKAIVISEPGKPEVLQLRDVADPEVKDDEVLVRVLATALNRADTLQRLGLYNPPPGSSPYLGLECSGTIESVGKNVSRWKVGDQVCALLSGGGYAEKVSVPAGQIFPVPAGISLKDATAFPEVACTVWSTVFMMGRLSAGESFLVHGGSSGIGTFAIQIAKHLGVRVFVTAGNEEKLAACKELGADVCINYKTEDFVAKVKAETDGKGVDVILDCIGAPYLQKNLDSLNFDGRLCIIGLMGGANAEIKLSSLLPKRLTVLGAALRPRSPENKAVVVAEVEKNVWPAIEAGKVKPVIHKYLPLSQAAEAHSLMESSKHIGKILLET

SEQ ID NO: 465 - DNA, 1161 bp, Arabidopsis thaliana
atgaacgcagcgcttgcaacaaccaccgccacaactcccgtactccgccgtgagacgcctcttcttcattattgttctctcacaacaaaatcgccggtttaccaaatcaacagagttagattcggatcttgcgtgcaaacagtcagcaagaaattcttgaaaatctcggcgagctctcagagcgcttcagcggcggtcaatgtcacggcggatgcttcgattccgaaagagatgaaggcgtgggtgtatagtgactacggcggagttgatgttctgaagctggagagtaacattgttgtgccggagattaaagaagatcaggttttgattaaagttgttgcggcggctcttaatcccgtcgatgctaagagacggcaagggaaatttaaagccactgattcgcctctcccgactgttccgggatacgacgttgccggagtagtggtgaaagtgggaagtgcggtgaaggatttgaaagaaggagatgaagtttatgctaacgtgagcgagaaagcattggaaggtccaaagcagtttggttctttagcggagtacacggccgtggaagagaagttattagctttaaaacctaaaaacatcgattttgcgcaagctgcagggcttccgttggcgatagaaaccgctgatgaaggtttagttaggactgaattctcagccggaaagtcaattcttgttcttaatggtgccggaggagtagggagtcttgtgattcagttggcgaagcacgtgtatggagcttcaaaagtagctgcaactgcgagtacagaaaagctagagctagtgagaagcttaggtgctgatttagctattgattacacaaaggagaatatagaagacttgcctgacaagtacgatgttgtctttgacgccattgggatgtgtgataaggcagtgaaggtgattaaggaaggagggaaagttgtggcattgactggagctgtcacgcctcctggttttcgattcgttgttacatctaatggcgatgttttgaagaaacttaacccatatattgagagtgggaaggtgaagcctgtggttgatcccaaaggaccgttcccattctcacgcgttgctgatgctttttcatacttagaaacgaaccatgccacagggaaggtcgttgtttatcccattccttaa

SEQ ID NO: 466 - protein, 386 aa, Arabidopsis thaliana
MNAALATTTATTPVLRRETPLLHYCSLTTKSPVYQINRVRFGSCVQTVSKKFLKISASSQSASAAVNVTADASIPKEMKAWVYSDYGGVDVLKLESNIVVPEIKEDQVLIKVVAAALNPVDAKRRQGKFKATDSPLPTVPGYDVAGVVVKVGSAVKDLKEGDEVYANVSEKALEGPKQFGSLAEYTAVEEKLLALKPKNIDFAQAAGLPLAIETADEGLVRTEFSAGKSILVLNGAGGVGSLVIQLAKHVYGASKVAATASTEKLELVRSLGADLAIDYTKENIEDLPDKYDVVFDAIGMCDKAVKVIKEGGKVVALTGAVTPPGFRFVVTSNGDVLKKLNPYIESGKVKPVVDPKGPFPFSRVADAFSYLETNHATGKVVVYPIP

SEQ ID NO: 467 - DNA, 1101 bp, Arabidopsis thaliana
atgcgagtgatgagatcattgcgcggtaattccggtgctggattggttttccggccggcgaggttaaattctcttcggagcgtctttaccggttgccgtgctgtgattttgccccgctttggtggtccggaggtttttgagctccgggagaatgttccggtgccgaatctgaatccaaatgaggttcttgtcaaggcgaaagctgtctccgttaatcctcttgattgcagaatacgagctggatatggacgttctgtattccaaccgcatctacctattatagttggacgtgatgtcagtggtgaagttgcggcaattgggacttcagtaaagtcacttaaagtaggacaagaagtttttggtgcgttgcatccgacggcgttaagaggtacttatactgactatggaattctttcggaagacgaactcacggaaaagccatcatcaatttcacatgtggaagcaagtgccattccttttgcagctttgactgcttggcgtgctttgaagagtaatgcaaggataactgaaggacaaagactattagtctttggaggaggaggagcagtaggtttttctgcaatccagcttgcggtagcatctgggtgtcatgttacagcctcttgtgttggtcagactaaagacagaatacttgcagctggggccgagcaagctgttgactacacaaccgaggacattgagttggcggtaaaaggaaaatttgatgccgtgttagatactattggtgggcctgaaacggagagaataggcattaacttcttaaggaagggtggaaactatatgactcttcagggtgaggctgcatcgttgactgataaatacggttttgtggttgggcttccccttgcaacatcgctcttgatgaagaaaaagatacaatatcagtattctcatggaatagactattggtggacgtatatgagggctgatcctgaaggtctagccgagattcagcgtttagttggagctggaaagctaaaaatacctgttgaaaaaacatttccaataaccgatgttgtagcagctcatgaagccaaggagaagaaacagattccgggtaaggtggttctagagttctga

SEQ ID NO: 468 - protein, 366 aa, Arabidopsis thaliana
MRVMRSLRGNSGAGLVFRPARLNSLRSVFTGCRAVILPRFGGPEVFELRENVPVPNLNPNEVLVKAKAVSVNPLDCRIRAGYGRSVFQPHLPIIVGRDVSGEVAAIGTSVKSLKVGQEVFGALHPTALRGTYTDYGILSEDELTEKPSSISHVEASAIPFAALTAWRALKSNARITEGQRLLVFGGGGAVGFSAIQLAVASGCHVTASCVGQTKDRILAAGAEQAVDYTTEDIELAVKGKFDAVLDTIGGPETERIGINFLRKGGNYMTLQGEAASLTDKYGFVVGLPLATSLLMKKKIQYQYSHGIDYWWTYMRADPEGLAEIQRLVGAGKLKIPVEKTFPITDVVAAHEAKEKKQIPGKVVLEF

SEQ ID NO: 469 - DNA, 978 bp, Arabidopsis thaliana
atgaaagcgatcgtgatctcggagccaggtaagccggaggttctgcaactccgtgatgtggcagacccagaagttaaagacgatgaggttctcatcagagttctcgctactgctttgaatcgtgcagatactctccaaagacttggcctttataatccaccacctggctcaagcccttaccttggtctcgaatgttctgggaccattgaatccgtcggtaaaggcgtctctcgatggaaagtcggagaccaggtgtgtgctcttctttctggaggaggttatgcagagaaagtttctgttcctgctggacaaattttcccaattcccgctggtatctctctaaaggatgcagcggctttccctgaagtggcatgcactgtttggtctactgtcttcatgatgggccgtctctctgttggtgaatcattcttgattcatggaggttcaagtgggattgggacatttgctattcagatagctaaacatctgggagtgagagtatttgtcacagctgggagtgatgaaaagctagctgcgtgcaaagaactcggggctgatgtttgtataaattacaaaaccgaggattttgttgcaaaggtaaaagcggaaaccgatgggaaaggagtggatgttatcttggactgcattggggcaccgtatttgcagaaaaatctcgacagcttaaactttgatggaaggttatgtattatcggtttaatgggaggagccaatgcagaaataaaactaagtagtctgcttccaaagcgtctcactgtcttaggagctgcattaagaccaagaagccctgaaaacaaagcagttgttgtaagggaagtcgagaagaatgtctggccagcgatagaagcagggaaggtaaaaccagtgatttacaagtatttaccattgtcacaagcagcagaaggtcatagccttatggagagtagcaaccatattggtaagattctccttgagacttga

SEQ ID NO: 470 - protein, 325 aa, Arabidopsis thaliana
MKAIVISEPGKPEVLQLRDVADPEVKDDEVLIRVLATALNRADTLQRLGLYNPPPGSSPYLGLECSGTIESVGKGVSRWKVGDQVCALLSGGGYAEKVSVPAGQIFPIPAGISLKDAAAFPEVACTVWSTVFMMGRLSVGESFLIHGGSSGIGTFAIQIAKHLGVRVFVTAGSDEKLAACKELGADVCINYKTEDFVAKVKAETDGKGVDVILDCIGAPYLQKNLDSLNFDGRLCIIGLMGGANAEIKLSSLLPKRLTVLGAALRPRSPENKAVVVREVEKNVWPAIEAGKVKPVIYKYLPLSQAAEGHSLMESSNHIGKILLET

SEQ ID NO: 471 - DNA, 1041 bp, Aquilegia sp.
atggaagcattactctgcaaaagtcttggagatccaacagaaccaatctcattaacatcaccaatctcaatatcaagaactcatccaatacccaaattgaattcaccaacatcaattagaattagagtgaaagcaacaagtttgaattatgcaaattatcttcaaattttagggaaatatcaagagaaattccctttaccatttgttcctggttctgattactctggtgttgttgatgctattggaaataaagttacgaaatttaaagttggtgataaagtttgttcttttgctgcaactggttcttttgctcagttcattgttgctgatgaaaatgatttgtttttggttccggatggatgtgatttgctcactgccggcgcgctccctgttgcatatggaacttcacatgtagcacttgttcatagagcgcagttaagtcctggtcaggtgttgcttgttctgggtgcagcaggtggtgttgggctttcagcggttcagattgggaaggtgtgtggcgctattgttattgctgttgctaggggagctgaaaaagtgcagtttctcaagtctctgggtgttgaccatgttgttgacttgagcaaggacaccattactgaaagtgtgaaggaattcttgaaggcaagaaagctcaaaggggttgatgtcctatatgatcctgtaggtggcaaacctacaaaagaaagcatgaagctgctgaagtggggagccaaaatattggtcatagggtttgctagtggagagattcccgtcgtaccagtgaatattgctctggttaagaactggacaatacatggactttattggggaagctacaaaatacataaacctgatgttcttgaagattctttgaaagagcttctttcctggctagcaaggggtctaataacccttaacatctctcatacttacagattatcagaggccaaccttgcatttgctgcaatcaaagaaagaaaagctatcggaaaggtgatgattgcttttgatgatcatagcactgtaagatctaagatctga

SEQ ID NO: 472 - protein, 346 aa, Aquilegia sp.
MEALLCKSLGDPTEPISLTSPISISRTHPIPKLNSPTSIRIRVKATSLNYANYLQILGKYQEKFPLPFVPGSDYSGVVDAIGNKVTKFKVGDKVCSFAATGSFAQFIVADENDLFLVPDGCDLLTAGALPVAYGTSHVALVHRAQLSPGQVLLVLGAAGGVGLSAVQIGKVCGAIVIAVARGAEKVQFLKSLGVDHVVDLSKDTITESVKEFLKARKLKGVDVLYDPVGGKPTKESMKLLKWGAKILVIGFASGEIPVVPVNIALVKNWTIHGLYWGSYKIHKPDVLEDSLKELLSWLARGLITLNISHTYRLSEANLAFAAIKERKAIGKVMIAFDDHSTVRSKI

SEQ ID NO: 473 - DNA, 1194 bp, Aquilegia sp.
atggaagctatccttaccaccacaaaccctttcaagatcactcaccaccaccaccaccaccaccacaacaacaaccagtccttctcctctaacgcaacacttccatcactctctcttaaacctcttccattatctttaacattcaaagtgacaaacacctatacttggagatactcatcatctcattcgcttagaatctctgctagttctcaagctgcacctacttccttggaaactagtacaagttctgctattcccacagaaatgaaagcttgggtttatggagactatggtggagtagatgttttgaaatttgattcaaaggtttcagtacctgaagtgaaggaagaccaggttttagtaaaggttgttgctgcggcgcttaatccagttgatggaaagaggaggctggggaaatttaaggctactgattctcctttacctactgttccaggctatgacattgctggtgtggtggtaaaggtgggaagccaagtaaagaccttgaaggaaggggatgaagtatatggggatatcaatgaaaaagctttggaatttcccaagcagtttggttcattagctgagtacactgccgttgaggagaaattgttggcacttaaacccaaaaatctggatttcattcaagctgcaagtcttccacttgcaattgagactgcttatgaaggccttgaacgaactggtttttctgctggtaaatctatccttgtattaggtggcgctggtggagttggaagcctggtaattcagctagcaaaggaagtatttggagcctctaaagttgcagctacctccagcactggaaaattggactttttgaagagcttgggtgtagatttggcaatcgactacactaaggagaattttgaagacttaccagagaaatttgatgtggtgtacgatgcagttgggcaatgtgataaggcagtgaaagctgtgaaagaaggggggagtgtagtggctctaactggtgctgtcactccacctggtttcagattcgtagtcacttcaaatggagaagttctgaaaaaactgaatccctatttggaaagtgggaaagtgaagccagtgcttgaccccaacggcacattccctttttctcaggtcgtggaagcattttcttatcttgaaacaggccgtgcgacagggaaagtagtcatacacccaattccatga

SEQ ID NO: 474 - protein, 397 aa, Aquilegia sp.
MEAILTTTNPFKITHHHHHHHHNNNQSFSSNATLPSLSLKPLPLSLTFKVTNTYTWRYSSSHSLRISASSQAAPTSLETSTSSAIPTEMKAWVYGDYGGVDVLKFDSKVSVPEVKEDQVLVKVVAAALNPVDGKRRLGKFKATDSPLPTVPGYDIAGVVVKVGSQVKTLKEGDEVYGDINEKALEFPKQFGSLAEYTAVEEKLLALKPKNLDFIQAASLPLAIETAYEGLERTGFSAGKSILVLGGAGGVGSLVIQLAKEVFGASKVAATSSTGKLDFLKSLGVDLAIDYTKENFEDLPEKFDVVYDAVGQCDKAVKAVKEGGSVVALTGAVTPPGFRFVVTSNGEVLKKLNPYLESGKVKPVLDPNGTFPFSQVVEAFSYLETGRATGKVVIHPIP

SEQ ID NO: 475 - DNA, 1068 bp, Capsicum annuum
atgccccaaaagtgccacgaaatggaagctctacttgtaagaaaactgggcgatcctactctgccaccgaatggctcggagaattcaccactcgatctctcaacgtcccaccctatccctaatttgtccactccaacctccgttagagttcgagtcaaagcgaccagcttgaatttcgcaaattacctccaagttctcggcaaataccaggagaagcctccattaccgttcatccctggctccgattactccggtttcattgatgccgttggacccaatgtcactaagttcagaattggggatcccgtttgctcttttattggccttggctcatttgcgcaattcgtcgtcgctgatgaatccgacttgtttcgagtacctgatgggtgtgatctagttgcagctggtgcacttcctgttgcatatgggacatcacatgtggctctggtgcatagagcgcagctgcgtcccaaacatgttttactggtacttggagcagctggaggcgttgggctctctgcagtacaaattgggaaagtttgtggagcaacagttattgcagtggctaggggaaatgaaaaggtgcagcttttgaaatctttaggtgttgatcatgcagtagacttgagcaatgcaaacgtcattgaaagtgtcaagggcttcctgaagtcaagaaagctcaaaggggttgatgtcttgtatgatccagttggtgggaagcttacaaaagatagcttaaagctattaaattggggagcacaaattctggttattggatttgcaagtggggaagtacctgtcatcccagcgaacattgctttagtgaagaactggacaattcacggactgtattggggaagccataagatacatcaacctaatgttcttggagattctctgaacgagcttctatctttgttgtgtaagggcttgattacaatcaacatttctcatacattcagcctggcagaggcccatcttgcttttactgctctcaaagataggagagcaattggaaaggtgatgataacatttgataatgggagaatcgtgaagtccaaactttaa

SEQ ID NO: 476 - protein, 355 aa, Capsicum annuum
MPQKCHEMEALLVRKLGDPTLPPNGSENSPLDLSTSHPIPNLSTPTSVRVRVKATSLNFANYLQVLGKYQEKPPLPFIPGSDYSGFIDAVGPNVTKFRIGDPVCSFIGLGSFAQFVVADESDLFRVPDGCDLVAAGALPVAYGTSHVALVHRAQLRPKHVLLVLGAAGGVGLSAVQIGKVCGATVIAVARGNEKVQLLKSLGVDHAVDLSNANVIESVKGFLKSRKLKGVDVLYDPVGGKLTKDSLKLLNWGAQILVIGFASGEVPVIPANIALVKNWTIHGLYWGSHKIHQPNVLGDSLNELLSLLCKGLITINISHTFSLAEAHLAFTALKDRRAIGKVMITFDNGRIVKSKL

SEQ ID NO: 477 - DNA, 990 bp, Cichorium intybus
atggttaaggcaattagaattcatgagcacggcggccctgaggtcttgaaatgggaagaggttgaagttccagatccaaaagagggagaaatcaggttgaagcaaaaggcaattggcctaaattacttggatgtgtatatgcgtcaaggtgtgcagaatctagctccacccttgccgtacattccaggtatggaaggagcgggagttgtaacagcggtcggtcccggagtaaccagctgcaaagtcggagatgttgtggcgtacgctagcccgcaggtgggttcttatgcccaagagagaatacttccggcagatctagcggtgccggttccttcttcccttgatcccgttgaagcagctgccgtgatttttaagggactcactgcacatgttttgatccataaaggctttaaggttgaacctggacatacgatcctggtacatgcggcggcaggcggagtcggatctttggtttgtcaatgggcaagtgcgattggagccactgtcatcggaacagtgtcgtccaaggagaaggctgtgcaggccaaggaagatggatgtcaccatgtcattctttacaaagaagaggactttgtggagcgtgtgatggagataacatctggcaaaggggtggaagtggtctacgattccgttgggaaagacaccttcaatggatcgttggcgtgcttgaagaagcgtggattcttggtgcttttcgggacagcatcaggtgtaccagacccggtacgtgtcgatcaaatcgcacccaaagctctgtactatacgttttcgtcggtcacagaatacacggttgataatcgagaggagctgcttgtagctgctgaagacttgttttctgcagttgcaaaaggagtgttgagaattcgtgttaatcacaagtatcctctgtctcaagcaacccaggctcacattgatcttgaaggtcgaaaaacaaccggttctgtagtgttgatcccggacgaagagtga

SEQ ID NO: 478 - protein, 329 aa, Cichorium intybus
MVKAIRIHEHGGPEVLKWEEVEVPDPKEGEIRLKQKAIGLNYLDVYMRQGVQNLAPPLPYIPGMEGAGVVTAVGPGVTSCKVGDVVAYASPQVGSYAQERILPADLAVPVPSSLDPVEAAAVIFKGLTAHVLIHKGFKVEPGHTILVHAAAGGVGSLVCQWASAIGATVIGTVSSKEKAVQAKEDGCHHVILYKEEDFVERVMEITSGKGVEVVYDSVGKDTFNGSLACLKKRGFLVLFGTASGVPDPVRVDQIAPKALYYTFSSVTEYTVDNREELLVAAEDLFSAVAKGVLRIRVNHKYPLSQATQAHIDLEGRKTTGSVVLIPDEE

SEQ ID NO: 479 - DNA, 948 bp, Centaurea solstitialis
atgacgacgacgacgatgaaagcctggaagtatgatgaatacggcggtgctgacgtcatgaaatacgtcaccgatgtggccgttcctgaaatcaacgacgatcaggtcttggttaaggtcgttgctgctgctcttaaccctatcgatttcaaaaggaggcttggattcttaaaagccgccgattcaccttttccgattgttccaggattcgatgttgccggagtcgttgttaaggtcggtagccaggtgaaaggcctgaaagaaggagacgaggtgtacggagatgtgaatgcaacaggtgccgttggagcgaaacagtttggaactttggcggagtacaccgctgttgaagagagattgttggctttgaaacctaagaacttggatttcgtacaggccgctgctctgcctcttgccattgaaactgcatatgaaggtctcgaaagggcaaatttcggtaaaggtaaatcgatccttgttctcaatggtgctggtggagttggaacattcataattcagcttgcaaaacacgtgtatggtgcttcgaaaatagcggccacatctagtaccggaaagatcgagttactcaagagtctaggcgctgatgtagccattgattacaccaaagagaactttgaagatctacccgataaatacgatgttgtctatgatgcttttggacaaacagagaaagcagtgaaggccgttaacgaaggtggtcttctggtgtccatagccgacttttctgttccacctccacatattagcttctttctcaactctgatggatctattttgacaaaactaaacccatacctagaaagcggaaaagtgaagccagtactcgaccctaaaaccccattcccttttgacaaagttatcgaagcttacacttaccttgagagccaccgagccactgggaaggtagttatctacccgataccttga

SEQ ID NO: 480 - protein, 315 aa, Centaurea solstitialis
MTTTTMKAWKYDEYGGADVMKYVTDVAVPEINDDQVLVKVVAAALNPIDFKRRLGFLKAADSPFPIVPGFDVAGVVVKVGSQVKGLKEGDEVYGDVNATGAVGAKQFGTLAEYTAVEERLLALKPKNLDFVQAAALPLAIETAYEGLERANFGKGKSILVLNGAGGVGTFIIQLAKHVYGASKIAATSSTGKIELLKSLGADVAIDYTKENFEDLPDKYDVVYDAFGQTEKAVKAVNEGGLLVSIADFSVPPPHISFFLNSDGSILTKLNPYLESGKVKPVLDPKTPFPFDKVIEAYTYLESHRATGKVVIYPIP

SEQ ID NO: 481 - DNA, 1020 bp, Chlorella vulgaris
atgagggctctagtgtgcagcaaactaggcgatcctctagcaacggagcccgccaagagtcccttggacatcgttcatgaccatccagaaccaaatctgcgggacagggatgtcaggatacagattgtcgcggcctcattgaattttgccgacgttctccaagtacagggccaatatcaggacaagccaccccttcccttcatccccggctctgaagtgtccggaattgtcaccgaaattggcagcaaagtgcgcggcgtgacaccgggagaacacgtgtgtgctgtcacaagagggggcgcctttgctgaagaggtggtcgtaccggagggcgctgtactgaagctgcctcatggcgtggacctcatcacagccgcagggcttcctgtggcatttggcacgtcgcatgtggcgctgaaggagcgagcaaatgtgcagccaggccagacggtgctggtcctgggagcggcgggaggagtgggcatcgctgccataagcaaagccatgggagccagggtggtggcggtgtgccgcggaagcagcaaggcggaggcactggagaggctgggggccgatgtagtcattgacacctcacagcagccggacacacctctgcgagccctcataaagaaagaagcaccaaagggcgtcgatgtcgtgtatgacccagtgggcggctctgccttccaagaggctctcaaggttgccaagtggggtgctcagatactcatcatcggctttgctagtggcagcatcccgaaggtcgcagcaaatatagtgcttgtcaagaatttgaccctgcatggcgtgttttggggaagctacatgcagcacaagcccattgtccttcagaagtccctgcaagagcttgtcagctggtgggcagcagggaagatcagcatctcagtgtcccacaggtttcctttggaggagtacagggaagctttcagaacgctcatgcacaggcaggcagttggcaaggtgctgcttctgccgggttcaagcacgagtcggctttga

SEQ ID NO: 482 - protein, 339 aa, Chlorella vulgaris
MRALVCSKLGDPLATEPAKSPLDIVHDHPEPNLRDRDVRIQIVAASLNFADVLQVQGQYQDKPPLPFIPGSEVSGIVTEIGSKVRGVTPGEHVCAVTRGGAFAEEVVVPEGAVLKLPHGVDLITAAGLPVAFGTSHVALKERANVQPGQTVLVLGAAGGVGIAAISKAMGARVVAVCRGSSKAEALERLGADVVIDTSQQPDTPLRALIKKEAPKGVDVVYDPVGGSAFQEALKVAKWGAQILIIGFASGSIPKVAANIVLVKNLTLHGVFWGSYMQHKPIVLQKSLQELVSWWAAGKISISVSHRFPLEEYREAFRTLMHRQAVGKVLLLPGSSTSRL

SEQ ID NO: 483 - DNA, 1044 bp, Chlorella vulgaris
atggtaagaccgttgatcagtgccacttcattgtgcaagcagctgttctcatcaacattgccaataaagttggctgatctcaggatggtgcgcgctgtagaaattcacaaaaccggacctcccgatgttttaaagcttacaaacgactacaagaagccaaaaatcgtcagtggacaggtcctcatccgacagataagtacttccgtaaatccagttgattacaaagtacggtctgggcgcgccgaaaaactgccaaaggtgttgggtggcgatgcagcagggatcatagcagagtcactttcatccaagtggaaggagggcgatcgtgtctttgcattgacccctgggttccgctgggacacagatgaatatgggtcatatgcagagtacactgccagccacgaagactggctggcgcttgtcccatccactcttgcgctagacattgcagggggtgtacctttggtagccctgactgcattccaggctctggaatctggtgggctgcagccagggaaggggcgggtgctggtgcatgctggagctggcggcgtgggccactttgcaatccagctggccaaggcgcactggaaggcttttgtggtcaccacaggatccaccaagaaccaggagttcctcaaggagctgggtgcggatgaggttgtcgactaccagacagaggactttgcagcgaagtacaaggacaagccctttgacctggtcattgacgcagtaggaggtgatgtggaagacaggagctacactgtgcttacagagacaggcacttatctgcacatcttcagcacccacactgacccaaagaagattgaggccgggaaagcctggaccggccgcaagtatgagacaactctggttgttccaaatggtgagcagctgcagatcgtcgcgggctacttggagcagggatctgtgaagctggttgtggacaagatcttcccgttggagcagatcagggaagcacatgaatacgctgaaaacaagcaaggaagggggaagattgtggtgcagatctccaaagagtga

SEQ ID NO: 484 - protein, 347 aa, Chlorella vulgaris
MVRPLISATSLCKQLFSSTLPIKLADLRMVRAVEIHKTGPPDVLKLTNDYKKPKIVSGQVLIRQISTSVNPVDYKVRSGRAEKLPKVLGGDAAGIIAESLSSKWKEGDRVFALTPGFRWDTDEYGSYAEYTASHEDWLALVPSTLALDIAGGVPLVALTAFQALESGGLQPGKGRVLVHAGAGGVGHFAIQLAKAHWKAFVVTTGSTKNQEFLKELGADEVVDYQTEDFAAKYKDKPFDLVIDAVGGDVEDRSYTVLTETGTYLHIFSTHTDPKKIEAGKAWTGRKYETTLVVPNGEQLQIVAGYLEQGSVKLVVDKIFPLEQIREAHEYAENKQGRGKIVVQISKE

SEQ ID NO: 485 - DNA, 993 bp, Chlorella vulgaris
atgcaggccatcgtttttgatgagccaggggacgagagcgtgttgcaattggggcatattcctattcctgaactccccccaagttctgtacgtatcaaagtggaagctgctggtctgaaccgcgcagacataaaccagcgccttggccaatacccccctccaccaggatcgagtcccatcctcgggcttgaagcagcaggaacaatttcagaggtcggatcaggatgcacagaggactggaaagtgggagacagagtcatggcgctatgcagtgggggagcctatgcagagcaggtggtggtggatgctggcagtgtgctgaagcttccggacagctggacaatgatagagggggctggtttcatggaggccactctgacagcttacctcaacatcttccagcttgggggcgctgagaaggggaagagcgtgctcatccatggaggaggctctggtgttggcagtcaggcgattgcgttatgcaaagccaaaggcatcacgacgtttgtgacagcagggagcgacgagaagtgtgagcgctgtctccagcggggagcgtcctacgttttgaactacaagacagagaatgtcattgacctggtgaacggcatgacaaagggcaagggtgtggatgtgatccttgactgcgtgggggcaccatacttggagcggaatctggagtgccttggcatggatggcaaagtggtctacatcggcatgatgggcggtgctgttgcggagaaggccaatctggggacgctgctgaagaagagggcgagtctgatcgggtccaccctgcgcaaccgcaccctgcaattcaaggcaaacctggtgcagaacctgcgcagggactttgcagatgagcggaaaagaggggatatcaaacccatcattgacaaggtgctgccactggagagtgctggggatgcgcaccggaggatggcaagcagcactcactttggcaagatcatcctcaatgtcaagcctgtttag

SEQ ID NO: 486 - protein, 330 aa, Chlorella vulgaris
MQAIVFDEPGDESVLQLGHIPIPELPPSSVRIKVEAAGLNRADINQRLGQYPPPPGSSPILGLEAAGTISEVGSGCTEDWKVGDRVMALCSGGAYAEQVVVDAGSVLKLPDSWTMIEGAGFMEATLTAYLNIFQLGGAEKGKSVLIHGGGSGVGSQAIALCKAKGITTFVTAGSDEKCERCLQRGASYVLNYKTENVIDLVNGMTKGKGVDVILDCVGAPYLERNLECLGMDGKVVYIGMMGGAVAEKANLGTLLKKRASLIGSTLRNRTLQFKANLVQNLRRDFADERKRGDIKPIIDKVLPLESAGDAHRRMASSTHFGKIILNVKPV

SEQ ID NO: 487 - DNA, 990 bp, Chlorella vulgaris
atggcagatgagatggaagccattgtctttgacacgtttgggccgcccagtgtcctcaagctcgtgcagtatccaaagccacgcccccggaaaggagaggttctggtgaagatccatgctgcaggagtgaatcctgtcgattataaaatccgcaaaggagagatgatgaaattcatcatttcgaaaccgaagatccctggaggtgacttgtcgggtgttgttgagaatgctccagctgagtccaagtggaacccgggacagaaggtctttgcactgacaaaaggattccagccctggaacaaagatggcacatacgctgggtactacgctgtcaaggaggaggatttggccgctcccccagccaccatgagctttgacgaggccggtgcaatgcccctggctgccctgacagccttccagtccttggaggcggctggagtgaaggaggggcagcgggtgctgatccatgccggggctggcggtgtcggaacatttgcaattcagctggccaaggcgcgcggcgcgcatgtgatcaccactgcaggcccccgcaacctcgaattcgtcaccaaggagctgggtgcagatgaggtgattgagtacaccacgcagcgctttgaggatgtgctcaagagcaacccggtggatgctgtgatcgacccagtgggaggccctgtggagacgcgcagctatgcagtgctgaagaggcgcggtcactaccagctcatcctcaacgagaaaacatcccctatccgcattgtcacaggggtggcaaagggcctgctgaggatggggcccacctatgggatcacggcagtgtcccccaacggcgcgcagctgcagaagatctctgacatggcggccgatggcaaggtcaaggtcattctggaccgcacctaccccctcgtggatgcaccggcggcgcatgagtacttggagcaggggcatgcacgcggcaaggtggtcctgaaggtggtggaaggctcatag

SEQ ID NO: 488 - protein, 329 aa, Chlorella vulgaris
MADEMEAIVFDTFGPPSVLKLVQYPKPRPRKGEVLVKIHAAGVNPVDYKIRKGEMMKFIISKPKIPGGDLSGVVENAPAESKWNPGQKVFALTKGFQPWNKDGTYAGYYAVKEEDLAAPPATMSFDEAGAMPLAALTAFQSLEAAGVKEGQRVLIHAGAGGVGTFAIQLAKARGAHVITTAGPRNLEFVTKELGADEVIEYTTQRFEDVLKSNPVDAVIDPVGGPVETRSYAVLKRRGHYQLILNEKTSPIRIVTGVAKGLLRMGPTYGITAVSPNGAQLQKISDMAADGKVKVILDRTYPLVDAPAAHEYLEQGHARGKVVLKVVEGS

SEQ ID NO: 489 - DNA, 1011 bp, Chlorella sp.
atggcggaggcagagggcagtgcgtcgcctgcgcctgtggtgaagcgcgtgcagtatgcacggtttgggccttcctcggagctggaggtggtgaccagcggcgtgctgcccaggcgccaggcagggcaggtgctggtggagaacaaggccacctcagtgaatcccgtggacggcaagctgcgcgaggggtatggcgggcggctggcgtcgcccaagctgccggccacgccgggcggcgacgtggcgggcgtggtggtggaggcggacgccggcagcaagttcaagccaggggaccgcgtgttcgggctgatgtaccgctgcgtcggcagctacaccagccatgtggcactgcccgaggccgccctggcccgcatcccagcctccctcagctttgaggaggcggcgtcgctgcccctggtggcgctgaccgcgtggcaggccctagagctggcggggttgagggaggggcagcgggtgctgatccacgccggggcgggcggcgtgggctccatttccatccagctggccaggatccggggcctccacgtcatcacaacctgctctgccaccaacgccgactttgtgcgccagctgggcgccgacgaggtgatagactacaggcaggagcggtttgaggaggtgctgaagggcaggcccgtggatgcggtgctggatgccgtggtgcacggggacgccccctgcgattatgagcagcgcagcatgaaggtgctgaagaagacgggcacctatgtcaacttcatccccaagccgatgctgctccccatcctcattggctttctgcgtggtgcctgttggctggggccgcggtaccgagtggtcattgtgtcgcccaacggcggccagctggaagccattggcaagctggtggaggagggcaaggtcaagcccatcatccacagcgtgctcccactggagaaggcagcggaggcgcaagatcaggttgcgactgggcacacccgtggcaagattgtgctgaagatcagcgagtaa

SEQ ID NO: 490 - protein, 336 aa, Chlorella sp.
MAEAEGSASPAPVVKRVQYARFGPSSELEVVTSGVLPRRQAGQVLVENKATSVNPVDGKLREGYGGRLASPKLPATPGGDVAGVVVEADAGSKFKPGDRVFGLMYRCVGSYTSHVALPEAALARIPASLSFEEAASLPLVALTAWQALELAGLREGQRVLIHAGAGGVGSISIQLARIRGLHVITTCSATNADFVRQLGADEVIDYRQERFEEVLKGRPVDAVLDAVVHGDAPCDYEQRSMKVLKKTGTYVNFIPKPMLLPILIGFLRGACWLGPRYRVVIVSPNGGQLEAIGKLVEEGKVKPIIHSVLPLEKAAEAQDQVATGHTRGKIVLKISE

SEQ ID NO: 491 - DNA, 1050 bp, Chlorella sp.
atgtcggaggaggagggccgcacctataaggcgctgctgtgcgagcggctgggcgaccctcaggagcagctggggaggccgcacagcgcgctgcgggtggcccgcctgcccgcgccgccgctcacccaccccaactcggtccgcatccgggtcgccgccgcagccctcaactttgcagacgccctgcagctgcaggggcagtaccaggagaagcccaagctgccctttgtgccgggcagcgagtgcagcggcacggtggtggaggtcggcagggatgtgcgcacgctgaaagtgggggacaaggtgtgcgcggtgacgcagggcggggcgtttggggaggaggcggtagccagggagaacctggtggtgaagctgccgcccaactgcgacgtggaagctgcggcagggctgccggtggcgtacggtaccgcctacctggcgctgcgggaccgcgcagacctgcggccaggccagacgatcctggtgctgggcgcggcgggcggcgtggggctggcggcggtgcagctggccaagtgcatgggggcgcgggtgattgcggtggcgcggggcttcaacaagatgcaggcactgagggaggcgggggtggacgaggtgattgacatgcagcaccacaagccggagcagctcaaggggctgctgcgccacagcgcgccgcaaggcgtggatgttgtgtttgaccccgtgggcggcgcgctgctgagcgagtcgctcaagtgtgtgcgctggggggcccgaatcctgatcatcggcttcgcctcaggctccatccccaagctgcccgccaacatcctgctggtgaagaacctagcggtacacggcatctactggggcagctaccagcagcacaacccgcgcgtgttcaggaagagcctggaggaggtggcgcgcctgtttggcagcggcgaggtggcggtgtcggtcagccaccgcttctccttggagcaggcgccagaggccttctccatcatgctcaaccgccaggtgattggcaagatcctgctgctgccccagccgcggtcgatgctctga

SEQ ID NO: 492 - protein, 349 aa, Chlorella sp.
MSEEEGRTYKALLCERLGDPQEQLGRPHSALRVARLPAPPLTHPNSVRIRVAAAALNFADALQLQGQYQEKPKLPFVPGSECSGTVVEVGRDVRTLKVGDKVCAVTQGGAFGEEAVARENLVVKLPPNCDVEAAAGLPVAYGTAYLALRDRADLRPGQTILVLGAAGGVGLAAVQLAKCMGARVIAVARGFNKMQALREAGVDEVIDMQHHKPEQLKGLLRHSAPQGVDVVFDPVGGALLSESLKCVRWGARILIIGFASGSIPKLPANILLVKNLAVHGIYWGSYQQHNPRVFRKSLEEVARLFGSGEVAVSVSHRFSLEQAPEAFSIMLNRQVIGKILLLPQPRSML

SEQ ID NO: 493 - DNA, 1029 bp, Emiliania huxleyi
atgaaggccgtgtgccaggcaggatacggcggggccgagcagctctcggtgcaggaggtgccgctcccaaagctcgaggcgagtagcgtcctcgtgcgcatcgttgccgtctctgtcaacgccggagaccaccacatgctcacaggccgcccgttcctcatccgtgtagctgttgggcggcaggcgatccctggcatggatttttctggcgttgtccatgcagtcggctccggcgtggagtgcaacttctccgagggcgacgaggtgtttggcaccgccgacaccaagtgcggcgcctttgcggagtacatctctgtcccggcgacgaatctggttcgtaagccagagaaggtgacctgggaggaggctgcggctctcccgacggcaggtatgacggcgctgcagtccctccgcacgggaaggccagtggagacgggcgggcgcgtcctgatcaacggcgcgtccagcggggttggcacctttgccgtgcagctggccaagttgatgggggcgaacgtgaccggtgtgtgctcgacggcgaatgttgcgatggtgcgctccctcggcgccgacgcggtcgtggactacaagaaggagagcgtcgagcaggctgcggcggcggctggcgagcgctacgacaagatcatcgacgccgtcggccggctgggctggcaccggctcctcaagcccaaggggtcgcacgtggctgtcgcgctgcccaatccggagtcggagtgcgtgccgtgcagcctgtgcgcgatcgcgtgctcgccgtggtgctgctgctgcctcagctcgtccaagtcgcacatgttcatgcaggaggtgcgcgcggccgacatggacgagctagccaagatggtggcggacggccagctccgccccgttctcggcctgcggctagtcgggatcagcgaggtgcccgacgcgctggcgggccacagcgaaacgctcgggcagggccaccgcacgggaaagaccgtggtctctctcagaggcgtccactcggagagcatggagagggagtag

SEQ ID NO: 494 - protein, 342 aa, Emiliania huxleyi
MKAVCQAGYGGAEQLSVQEVPLPKLEASSVLVRIVAVSVNAGDHHMLTGRPFLIRVAVGRQAIPGMDFSGVVHAVGSGVECNFSEGDEVFGTADTKCGAFAEYISVPATNLVRKPEKVTWEEAAALPTAGMTALQSLRTGRPVETGGRVLINGASSGVGTFAVQLAKLMGANVTGVCSTANVAMVRSLGADAVVDYKKESVEQAAAAAGERYDKIIDAVGRLGWHRLLKPKGSHVAVALPNPESECVPCSLCAIACSPWCCCCLSSSKSHMFMQEVRAADMDELAKMVADGQLRPVLGLRLVGISEVPDALAGHSETLGQGHRTGKTVVSLRGVHSESMERE

SEQ ID NO: 495 - DNA, 951 bp, Emiliania huxleyi
atgtccgccatcgtcgccagagacgccgcgtgcaccgtcgtcaccgtgccgacgccgcagccggcggcaggcgaggtgctcatccaggtcagagcgaccgcaatcaaccggttggatgtgatgcagcggcgtggcaagagtcccgtcccgaagggtgtgacagaggttctcggtctcgaggcggcgggcatagtcgtggcgaccagctcagcggcctttgaggtcggtgacgaggtgctcgcgctggtgccgggcggaagctacgccgagtacgtcgcggtcgacgcgaccaccgtcatgcgcaagccgcgatcgatgtcgtgggccgaggccgcctcggtgccggaggcctggctgacggcgtcgctcaacctgcggctcgcaaacgtgtcgcctggagagaccgtcctcatccacgcggccgcgtcgggcgtcggtgtcgcctcggtccagcttgcgcgggcggcgggcgcgcgcgtgcttgtgactgtgggatccgcggcgaagctcgagctcgcgcagtcgctcggcgcgagcggcggcgctctgcggcacgacgggccgtggatagaggcggtccgtgcggcagcgccgggcggcaaggtggacgcggtgctcgactgcgtcgccggcgcgtacgcggagcagaacgtcgaggccctcggcgtcgacgggaggttgatgcccgaggggctcgccaagggcttcttggcgaccctgatgaagaagcgcgtccagcttctcgccaccacgctccgcacgcgcagcaggcccttcaagaaggagctcgtcgacgccttcgctgcgcaggtgctgccgcacatcggctcgcgcttccgtcacgtcatcgacaaggagttcgacggcctcgcctcggcccaagccgcgcacgactacctcgagagcaacgcaaatgcgggcaaggtggtcctgaaagtcagccagctctaa

SEQ ID NO: 496 - protein, 316 aa, Emiliania huxleyi
MSAIVARDAACTVVTVPTPQPAAGEVLIQVRATAINRLDVMQRRGKSPVPKGVTEVLGLEAAGIVVATSSAAFEVGDEVLALVPGGSYAEYVAVDATTVMRKPRSMSWAEAASVPEAWLTASLNLRLANVSPGETVLIHAAASGVGVASVQLARAAGARVLVTVGSAAKLELAQSLGASGGALRHDGPWIEAVRAAAPGGKVDAVLDCVAGAYAEQNVEALGVDGRLMPEGLAKGFLATLMKKRVQLLATTLRTRSRPFKKELVDAFAAQVLPHIGSRFRHVIDKEFDGLASAQAAHDYLESNANAGKVVLKVSQL

SEQ ID NO: 497 - DNA, 972 bp, Fragaria x ananassa
atggctgcagctccaagtgagtccataccctctgtaaataaggcctgggtctattcagagtatggaaaaacttctgatgttctcaagtttgatccaagtgtggctgttcctgaaattaaagaggatcaggtgctgatcaaggttgttgctgcttctcttaacccagttgattttaagagggctcttggttacttcaaggacactgactctcccctacctacaattccagggtatgatgtagctggtgtggtggtaaaggtaggaagccaagtaaccaagtttaaggtgggggatgaagtgtatggggatctcaatgagacagcattggtgaacccaacaaggtttgggtctttggcagagtacactgctgcatatgaaagagtattggctcacaaacccaaaaacctgagctttattgaagctgctagccttcccttggctattgaaactgcccatgaagggcttgaaagagctgaactttctgctggtaaatccgtccttgttttgggaggcgctgggggtgttggaacacatattattcagcttgcaaagcatgtttttggtgcttccaaagtagcagctactgcaagcactaagaaactggatttgttgagaaccttgggtgctgctgatttggctatcgattacaccaaggagaacttcgaggacctgccagagaaatttgatgtagtgtatgatgcagttggggagacagataaggctgtgaaggcggtgaaagaaggcgggaaggttgtaacaatagtaggtccagcaacgccaccggctatcctttttgtgcttacctctaaagggtctgtgttggagaaactgaagccttacttggagagtgggaaggtgaagccagttcttgatcccacaagtccatatccctttactaaagttgttgaagcatttggttaccttgagagttccagagctaccggaaaggtggttgtgtatcccatcccatga

SEQ ID NO: 498 - protein, 323 aa, Fragaria x ananassa
MAAAPSESIPSVNKAWVYSEYGKTSDVLKFDPSVAVPEIKEDQVLIKVVAASLNPVDFKRALGYFKDTDSPLPTIPGYDVAGVVVKVGSQVTKFKVGDEVYGDLNETALVNPTRFGSLAEYTAAYERVLAHKPKNLSFIEAASLPLAIETAHEGLERAELSAGKSVLVLGGAGGVGTHIIQLAKHVFGASKVAATASTKKLDLLRTLGAADLAIDYTKENFEDLPEKFDVVYDAVGETDKAVKAVKEGGKVVTIVGPATPPAILFVLTSKGSVLEKLKPYLESGKVKPVLDPTSPYPFTKVVEAFGYLESSRATGKVVVYPIP

SEQ ID NO: 499 - DNA, 966 bp, Gossypium hirsutum
atggcttcaagtgctgcaacccttccatctaaaatgaaagcatggacttaccttgagtacggaaaatcatctgatgttctgaaactacaatccgatgttgttgttccccaacccagggatgatcaagttcttctccaagttgtagctgctgggattaaccccattgatttcaaaagaatgcttggaatgttcaaaaacagtgattcccctttacccatcattccagggtatgatgtagcaggcgtggtggtgaaagtggggagccaagttaagaaattcaaggaaggggatcaggtgtatggagatataaatgaaaaggccatggatcacccaacacaatttggcactatagctcaatacactgttgttgcagagaagctgttggctttaaaacccaaaaatctcagctttgttgaagctgcaagcctgcctttagtcattgagactgcctatgaaggccttgaacgatgccatttttctgctggcaaatctatccttgtcttgggcggtgctggcggcgttggcaccatgattattcagctagctaagcaagtctatggagcatccaaaatagcagccacagcaagtaccgggaaactggatttgctgaagagcttgggggctgatttgcctattgactacactaatcaaaactttgaagatctgcctgagaaattcgatgtagtatacgatgcagtcgggcaatgtgagagggcagtgaaggcagtgagagaaggtggggatgtagtgacaatatatggagcggtagttccaccagcaacaacattcatcctcacatcaaatggagcaattttagagaaattggagcctttcttggagagtgggaaagttaagccaatgatcgatcccaatggcatatttcccttttctgaaactccacaagcctttgcttaccttgaaaccggccgagttaccgggaaagtggtcatttctataatcccatga

SEQ ID NO: 500 - protein, 321 aa, Gossypium hirsutum
MASSAATLPSKMKAWTYLEYGKSSDVLKLQSDVVVPQPRDDQVLLQVVAAGINPIDFKRMLGMFKNSDSPLPIIPGYDVAGVVVKVGSQVKKFKEGDQVYGDINEKAMDHPTQFGTIAQYTVVAEKLLALKPKNLSFVEAASLPLVIETAYEGLERCHFSAGKSILVLGGAGGVGTMIIQLAKQVYGASKIAATASTGKLDLLKSLGADLPIDYTNQNFEDLPEKFDVVYDAVGQCERAVKAVREGGDVVTIYGAVVPPATTFILTSNGAILEKLEPFLESGKVKPMIDPNGIFPFSETPQAFAYLETGRVTGKVVISIIP

SEQ ID NO: 501 - DNA, 1095 bp, Glycine max
atgagaattccaagcaattgcgagttcacacgaatcacgccctctgctttcagctaccaccgtctcaaatcctacgtttccgactgcagagccgtgcttctcccctcattcggcggcccgcacgtgctccagcttcgctcgcacgtgccagtccctccgctcaagcctcacgatgtcctcgttcgtgcgcgcgccgtctccgtcaaccccttggacacccgaatgcgtgctggctacgggcgttccatcttcgagccgctgttgcctctcattttggggcgcgacgtcagcggcgaggtttcggcggtcggagataaggtgaggtcggtgagtgtgggagaacaggttttcggggcactgcatcccactgccgtgagaggcacttactcggattacgcgattctctccgaagaggaggttactccgaaaccggattcacttactcatgtggaagccagtgccattccttttgctgcattgacagcttggcgtgctctaaaaagtacagctagaataagcgagggacaacggatattagtagtcggaggtggaggagcagtagggttgtctgcagttcagcttgcagtagctgctggttgctctgttgcaactacttgtggaagtcaaagcgtagacagattgttagcagctggtgcagatcaggctgtcgattatgttgctgaggatgttgaattggctataaagggaaagtttgatgctgttttggacactattggtgtgccagagacagaacggatgggcattaattttctaaaacgaggtggacactacatgacacttcagggtgaggcagcatcattgtctgatagatatggactgactattgggcttcctgcagctacagctgttttattgaaaaaacagcttctatatcgattctctcatggaatagaatactcatggacatatatgagggctgatttagatggtttaattgagattcgaaagctatgtgaagctgggaagatgaagatacctgtgtataaaacgtttcccataacacaagtaaaagaagctcatgaggcaaaagacaagaagctcattcctggtaaagttgtactggaacttgattga

SEQ ID NO: 502 - protein, 364 aa, Glycine max
MRIPSNCEFTRITPSAFSYHRLKSYVSDCRAVLLPSFGGPHVLQLRSHVPVPPLKPHDVLVRARAVSVNPLDTRMRAGYGRSIFEPLLPLILGRDVSGEVSAVGDKVRSVSVGEQVFGALHPTAVRGTYSDYAILSEEEVTPKPDSLTHVEASAIPFAALTAWRALKSTARISEGQRILVVGGGGAVGLSAVQLAVAAGCSVATTCGSQSVDRLLAAGADQAVDYVAEDVELAIKGKFDAVLDTIGVPETERMGINFLKRGGHYMTLQGEAASLSDRYGLTIGLPAATAVLLKKQLLYRFSHGIEYSWTYMRADLDGLIEIRKLCEAGKMKIPVYKTFPITQVKEAHEAKDKKLIPGKVVLELD

SEQ ID NO: 503 - DNA, 1095 bp, Glycine max
atgagaatcccaagcaatcgcgacttcacacgaatcacgccctctgctttcacttaccaccgtctcaaatcctacgtgtccgattgcagagccgttcttctcccctctttcggcgggcctcacctcctccagcttcgctcgcacgtgccagtccctccgctcaagtcgcacgatgtcctcgttcgtgcgcgcgccgtctccgtcaaccccttggacacccgaatgcgtgctggctacgggcgttccattttcgagcggctgttgcctatcattttggggcgtgacgtcagcggcgaggttgcggcggtcggagataaggtgaggttggtgagtgtgggagagcaggttttcggggctctgcatcccactgccgtgagaggcacttacgcagattacgcgattctctccgaagaggaggttactccgaaaccagattcacttactcatgtggaagcaagtgccattccttttgctgcattgacagcttggcgtgctctaaaaagtactgctagaataagcgagggacaaaggatattggtagtaggaggtggaggagcagtagggttgtctgcagttcagtttgcagtagctgctggttgctctgttgtaactacttgtggaagtcaaagtgtagacagattgttagctgctggtgcagagcaggctgttgattatattgctgaggatgttgaattggctataaagggaaagtttgatgctgttttggacactattggtatgccagagacagaacggatgggcattaattttctaaaacggggtggacactacatgacacttcagggtgaggcagcatcattgtctgatagatatggactgattattgggcttccagcagctacagctgttttattgaaaaagcagcttctataccgattttctcatggaatagaatactcatggacatacatgagggatgacttagagggtttaactgagattcgaaaactatgtgaagctgggaagatgaagatacctgtgtataaaacgtttcccatagcacaagtaaaagaagctcacgaggcaaaagacaagaagctcattccaggtaaagtagtactggaaattgattga

SEQ ID NO: 504 - protein, 364 aa, Glycine max
MRIPSNRDFTRITPSAFTYHRLKSYVSDCRAVLLPSFGGPHLLQLRSHVPVPPLKSHDVLVRARAVSVNPLDTRMRAGYGRSIFERLLPIILGRDVSGEVAAVGDKVRLVSVGEQVFGALHPTAVRGTYADYAILSEEEVTPKPDSLTHVEASAIPFAALTAWRALKSTARISEGQRILVVGGGGAVGLSAVQFAVAAGCSVVTTCGSQSVDRLLAAGAEQAVDYIAEDVELAIKGKFDAVLDTIGMPETERMGINFLKRGGHYMTLQGEAASLSDRYGLIIGLPAATAVLLKKQLLYRFSHGIEYSWTYMRDDLEGLTEIRKLCEAGKMKIPVYKTFPIAQVKEAHEAKDKKLIPGKVVLEID

SEQ ID NO: 505 - DNA, 978 bp, Glycine max
atgaaggccatagtgataacgaggccaggaggtcccgaagtgctccaacttgaggaagtggaagatcccctagtcggagacgacgagcttctcatcggagtccacgccacttcccttaacagagccgatacctttcagaggaaaggctcctaccctccccctaagggcgccagcccttacctcggtctcgaatgttccggaactgtcctttccctgggtaaaaacgtttccagctggaaaatcggtgatcaggtgtgtgctcttctcgccggaggcggatatgccgagaaagttgcagttccggtaggacaagttcttccggttccagccggtgtttctctcacggatgcagctagttttcctgaggttgcttgcactgtctggtcaactgttttcatgatgagtcgcttatctcaaggggaaaccttgttggttcatggaggttccagtgggattggtacatttgcaattcagatagccaagtatcgagggtcacgagtgtttgttactgcaggaagtgaggagaagctagctttttgcaagagtatcggagctgatgtgggcatcaattataaaacagaagactttgttgcgcgggtaaaggaagaaactggtggccaaggtgttgatgttattcttgattgtatgggagcatcctactatcaaagaaatcttgatagcttgaattttgatggaaggctttttattattggctttcaaggtggggttagtacacaagcagatctacgccctttacttgctaagcgtctcacagtacaaggagctggcttacgcaatagaagtctggaaaataaagctgtgattgttagtgaagtggagaagaatgtttggcctgcaattgccgaaggaaaggttaagcctgtggtctacaaatctttcccgctttctgaggcagcggaggctcaccagcttatggaaagcagccagcatattgggaagatattgcttttgccatga

SEQ ID NO: 506 - protein, 325 aa, Glycine max
MKAIVITRPGGPEVLQLEEVEDPLVGDDELLIGVHATSLNRADTFQRKGSYPPPKGASPYLGLECSGTVLSLGKNVSSWKIGDQVCALLAGGGYAEKVAVPVGQVLPVPAGVSLTDAASFPEVACTVWSTVFMMSRLSQGETLLVHGGSSGIGTFAIQIAKYRGSRVFVTAGSEEKLAFCKSIGADVGINYKTEDFVARVKEETGGQGVDVILDCMGASYYQRNLDSLNFDGRLFIIGFQGGVSTQADLRPLLAKRLTVQGAGLRNRSLENKAVIVSEVEKNVWPAIAEGKVKPVVYKSFPLSEAAEAHQLMESSQHIGKILLLP

SEQ ID NO: 507 - DNA, 969 bp, Glycine max
atggcagaagatgcttcaattattccaacacacacaaaagcttggtactactctgaacatggtagtccaggtgatgttctcaaattagatcctaattggcccttaccccaacaactcaaagatgaccaagtgctcatcaaggtcatcgctgcatccattaatcccgttgattacaagaggatgcacggcgagttcaaggacactgaccctcatctgcctattgtgccgggttatgatgttgctggcatagtagtgaaagtgggaggagaagtaaaaaaatttaaggttggagatgaagtatatggtgatatcaacgagcaaggcttgtcgaaccttaagattcatggcactttgtcagagtatactattgcagaagagagactattggctcataaaccatccaatctaagcttcattgaagctgctagcattcctttagcacttgagactgctaacgaaggttttgaacatgctcacttctctgctggcaaatctatccttgttttgggaggagctggtggagttggaaactatgttattcagctagctaaacaagtttataaggcgtctaagatagcagcaactgctagcaccggcaaacttgaacttttaagggagttgggcgttgacttgcctattgattacacaaaggagaactttgaagaccttccagaaaaatacgatctagtgtatgatgtagtagggcaaggtgatagagcatttaaggccgttaaggaagatgggaaagttgtgacaatagtaccacctggacatccaccagctatgtttttcgtgctcacctcaaagggatctatcttagagaatttaagaccttactttgagagtggtaagttgaagcctatactcgatgccaagactccagtgccattttctcaggttattgaagccatttcctacttagaaacttcaagagccacaggaaaagtggtcgtttatcccataccctaa

SEQ ID NO: 508 - protein, 322 aa, Glycine max
MAEDASIIPTHTKAWYYSEHGSPGDVLKLDPNWPLPQQLKDDQVLIKVIAASINPVDYKRMHGEFKDTDPHLPIVPGYDVAGIVVKVGGEVKKFKVGDEVYGDINEQGLSNLKIHGTLSEYTIAEERLLAHKPSNLSFIEAASIPLALETANEGFEHAHFSAGKSILVLGGAGGVGNYVIQLAKQVYKASKIAATASTGKLELLRELGVDLPIDYTKENFEDLPEKYDLVYDVVGQGDRAFKAVKEDGKVVTIVPPGHPPAMFFVLTSKGSILENLRPYFESGKLKPILDAKTPVPFSQVIEAISYLETSRATGKVVVYPIP

SEQ ID NO: 509 - DNA, 963 bp, Glycine max
atggcaagcatttctagcattccatcacacataaaaacttgggtttattctgaatatgggaacacagaagagattctaaaatttgatcccaacgtacctataccagacatcaaggaagaccaggtgctcatcaaggttgtggctacagctcttaatcctgtggattataagagggctcttggctatttcaagaacactgactctcccttacctagtgttccggggtacgatgttgctggtgtggtggtaagagtgggaagtaaagtgaggaaattcaaggttggggatgaggtttatggtgatatcaatgagtatgctgtgaataatccaaagaccattgggactttggcagagtacactgctactgaagagaaattgttggctcacaaaccctccaatttgagctttattgaagctgctagccttcctttagctatcatcactgcttatcaaggacttgaaagagttgatttttctgctggaaaatctatacttgttctaggaggtgctggtggagttggatcccttgttattcagctcgccaagcacgtttttggcgcatccaaggttgcagctactgctagttccgcaaaactggatttattaaggaacttgggagcagactttcctattgattacacaaaggagaattttgaagagcttgcagagaagtttgatgtagtgtacgatacaatagggcagagtgacaaggcattgaaggctatcaaagaaggggggaaagttgtgacaatagcaccaccagcaactccacctgctatcccattctttctcacttcagatggtgctgtgttggagaagttacaacctcacttagaaagtgggaaggtgaagccagtattggatcctaagagtccctttccattttctcagattgtggaagcatattcatacttgaagacaaatagagccattgggaaagtagtcatacatcccatcccttga

SEQ ID NO: 510 - protein, 320 aa, Glycine max
MASISSIPSHIKTWVYSEYGNTEEILKFDPNVPIPDIKEDQVLIKVVATALNPVDYKRALGYFKNTDSPLPSVPGYDVAGVVVRVGSKVRKFKVGDEVYGDINEYAVNNPKTIGTLAEYTATEEKLLAHKPSNLSFIEAASLPLAIITAYQGLERVDFSAGKSILVLGGAGGVGSLVIQLAKHVFGASKVAATASSAKLDLLRNLGADFPIDYTKENFEELAEKFDVVYDTIGQSDKALKAIKEGGKVVTIAPPATPPAIPFFLTSDGAVLEKLQPHLESGKVKPVLDPKSPFPFSQIVEAYSYLKTNRAIGKVVIHPIP

SEQ ID NO: 511 - DNA, 969 bp, Glycine max
atggcaagcactcctagcattccatcacacataaaagcttgggcttattctgaatatgggaacacagaagagattctcaaatttgaatctaacatacctataccagacatcaaggaagaccaagtgctcatcaaggttgtggctgcagcccttaacccaatagattataagagggctcatgggtttttgaagaacactgattctccctttcctactgttccggggtacgatgttgctggtgtggtggtcaaagtgggaagtcaagtgagtaaattcaaggttggggatggggtttatggtgacatcaatgaggatcctgtgaataatccaaaggccattgggtctttggcagagtacactgctgttgaagagaaagtgttggctcacaaaccctccaatttgagctttgttgaagctgctagccttcctttggccatcataactgcttatcaaggatttgaaaaggttgagttttctgctggcaaatctatacttgttcttgggggtgctggtggagttggatcccttgttattcagctcgcgaagcacgtttttggcgcatcaaaggttgcagccacagctagtactgcaaaactggatttgttaaggaacttgggagcagacttagctattgattatactaaggagaattttgaagaactggaagagaagtttgatgtagtgtacgacacagtaggagaaagtgagactgagaaggcattgaaggctgttaaagaaagtggcaaagttgtgacaatagtgagatttggacatcctgaagctatattcttcatacgaatttcagatggtactgtgttggagaaactaaaaccttacttagagagtgggaaggtgaagccaatattggaccctaagagtccctatccattttctcagaccgtggaggcatttgcacacttgaagactaatagagccattgggaaagtggtcatacatcccattccataa

SEQ ID NO: 512 - protein, 322 aa, Glycine max
MASTPSIPSHIKAWAYSEYGNTEEILKFESNIPIPDIKEDQVLIKVVAAALNPIDYKRAHGFLKNTDSPFPTVPGYDVAGVVVKVGSQVSKFKVGDGVYGDINEDPVNNPKAIGSLAEYTAVEEKVLAHKPSNLSFVEAASLPLAIITAYQGFEKVEFSAGKSILVLGGAGGVGSLVIQLAKHVFGASKVAATASTAKLDLLRNLGADLAIDYTKENFEELEEKFDVVYDTVGESETEKALKAVKESGKVVTIVRFGHPEAIFFIRISDGTVLEKLKPYLESGKVKPILDPKSPYPFSQTVEAFAHLKTNRAIGKVVIHPIP

SEQ ID NO: 513 - DNA, 1194 bp, Glycine max
atgcaaagcatgtctctctgtgcttcactctcctccacagcttcacacctcacttcccttgcctccgtctcttcttccacctctccactttcccgcaaattttctctcactttccgggaaaaaaacagaaccccaattgcaccacctcacaagctccccttcttctcagcaaggcctgcccccaccagagtagtgttggtgaagtctcaggccacagcacctgcttcttctgaggctgtgaaggtgacaccggtgccttctgagatgaaggcatgggtgtatggagaatatgggggtgtggatgttctgaagctggactccaatgttgctgtgcctgatgtgaaggaggatcaggtgttaatcaaagttgttgctgctgctcttaaccctgttgatgccaagaggaggcagggaaagtttaaagccactgattctcctcttccgactgttccgggctatgatgttgcgggtgtggtggtgaaagttggtagtcaagtgaaggactttaaagtgggtgatgaagtgtatggagatgtaaatgagaaagcacttgaaggtcctaagcagttcggatctttggctgagtacacagctgttgaggagaaattgttggcaccaaaaccgaagaatttggactttgctcaagctgcttctcttcctctagcaattgagactgcttatgagggtttggagaggactggattttctcctggtaaatctattcttgttctaaatggttctggaggagttggaagcctagtgattcagctagctaagcaagtttatggagcttcaagagttgctgccacttcaagcactagaaatttggacctactgaaaagcttgggagctgatttggccattgactacacaaaagagaactttgaagatttgccagaaaaatttgatgtagtttatgatgccattgggcaatgtgacagggcagtgaaggctgtgaaagaagacggcagtgtggtggcactcacaggtgctgttacaccacctggcttcagatttgtagttacttccaatggagaagttctgaggaaactaaacccttacttagaaagtgggaaggtgaagccaattgttgaccccaaaggtccattcccctttgataagcttgctgaagccttctcttaccttgaaacaaaccgagcaactggaaaggttgttatacatcccatcccttga

SEQ ID NO: 514 - protein, 397 aa, Glycine max
MQSMSLCASLSSTASHLTSLASVSSSTSPLSRKFSLTFREKNRTPIAPPHKLPFFSARPAPTRVVLVKSQATAPASSEAVKVTPVPSEMKAWVYGEYGGVDVLKLDSNVAVPDVKEDQVLIKVVAAALNPVDAKRRQGKFKATDSPLPTVPGYDVAGVVVKVGSQVKDFKVGDEVYGDVNEKALEGPKQFGSLAEYTAVEEKLLAPKPKNLDFAQAASLPLAIETAYEGLERTGFSPGKSILVLNGSGGVGSLVIQLAKQVYGASRVAATSSTRNLDLLKSLGADLAIDYTKENFEDLPEKFDVVYDAIGQCDRAVKAVKEDGSVVALTGAVTPPGFRFVVTSNGEVLRKLNPYLESGKVKPIVDPKGPFPFDKLAEAFSYLETNRATGKVVIHPIP

SEQ ID NO: 515 - DNA, 960 bp, Glycine max
atggctgcaatatcaataccttctcacatgaaagcttggacatactctgagtatggaaaatccaaggaagttctcaagtttaatcagagtgtggctttgcctgaggtgaaggaagaccaggtcctcatcaaggtcgctgctgcttcccttaaccccattgatcataagagaatggaaggctatttcaagaacagcgactcccctttacctactgctccgggttatgatgttgctggagtggtggttaaagtgggaagtgaagtgaagaaatttaaggttggggatgaagtttatggtgatatcaatgtgaaagctttggaatatccaaaggtgattggttctttggctgagtacactgctgcagaagagaggctattggctcacaagccacagaatctgagctttgctgaggctgctagccttcctttaacacttgagactgcttatgaaggccttgaacgaaccgggttttctgctgggaaatctatccttgtgcttggaggtgctggtggagttggaacccatgttattcagcttgccaagcatgtttatggagcatccaaggtagcagctactgctagcactaggaaactggaactattaaggaatttgggagctgactggcctattgattatacaaaggagaattttgaagacctgtctgaaaagtttgatgtggtgtatgatacagtagggcaaactgaacaggcattcaaggttttgaaagaaggaggaaaagttgtgacaatagtaccacctggatttcatccagctatccttttcatactctctactgatggggcgatcttagagaaactaaacccctattttgagagtggtaagctgaagccaatacttgacccgaagagcccgtttccattttctcagactgttgaagcgtttgcccatctggaaacaaacagagcaactggaaaaatagttgtctatcccattccatga

SEQ ID NO: 516 - protein, 319 aa, Glycine max
MAAISIPSHMKAWTYSEYGKSKEVLKFNQSVALPEVKEDQVLIKVAAASLNPIDHKRMEGYFKNSDSPLPTAPGYDVAGVVVKVGSEVKKFKVGDEVYGDINVKALEYPKVIGSLAEYTAAEERLLAHKPQNLSFAEAASLPLTLETAYEGLERTGFSAGKSILVLGGAGGVGTHVIQLAKHVYGASKVAATASTRKLELLRNLGADWPIDYTKENFEDLSEKFDVVYDTVGQTEQAFKVLKEGGKVVTIVPPGFHPAILFILSTDGAILEKLNPYFESGKLKPILDPKSPFPFSQTVEAFAHLETNRATGKIVVYPIP

SEQ ID NO: 517 - DNA, 978 bp, Gossypium raimondii
atgaaggcaatagttataactacaggaggaggcccagaggtgttgcaattgcaacaagtagaagacccagaactcaaagatgatgaggttctcatcaaggtagaagctaccgctctaaaccgggctgatactctacagagaaaaggttcctaccctcctccaaagggtgctagcccttaccctggtcttgaatgttctggtactatccaagccgttggcaagaatgttctgggctggagagttggtgatcaggtgtgtgctcttcttagtggaggtggatatgctgagaaagtggcagtcccagctggtcaagttcttccaatcccacttggggtttccctcaaagaagctgctggtttacctgaagttgcttgtactgtttggtccactgtttttatgatgagtcgattatctgctagggagacattcttggtccatggtggttcaagtgggattggcacttttgcaattcagatagctaagagcaaaggagcaacagtgtttgctacagcagggaatgaagaaaagttagctttctgcaagagtcttggagctgatttgtgcatcaattataagacagaggactttgttgcgtgcgttaaggaagaaactggagggaagggtgtcgatgtgattctggattgcatcggggcagcgtaccttcagcgaaacctggacagtttaaattttgatggaaggctttgtatcattggcttgcagggaggagctgtgaccgaaattaaacttaatactttatttccaaagcgcctcacagtgcaaggggctgcgttgcgaccaagaaatccagaaaacaaagcaatggttgttaatgaagtggagaagaatgtttggccagaaatcgtggcgggcaaggtgaagcctatcatctacaaatcatttcccttatctgaggctggggaggctcataagctaatggaaagtaatgagcatattgggaagatactgcttgttccatga

SEQ ID NO: 518 - protein, 325 aa, Gossypium raimondii
MKAIVITTGGGPEVLQLQQVEDPELKDDEVLIKVEATALNRADTLQRKGSYPPPKGASPYPGLECSGTIQAVGKNVLGWRVGDQVCALLSGGGYAEKVAVPAGQVLPIPLGVSLKEAAGLPEVACTVWSTVFMMSRLSARETFLVHGGSSGIGTFAIQIAKSKGATVFATAGNEEKLAFCKSLGADLCINYKTEDFVACVKEETGGKGVDVILDCIGAAYLQRNLDSLNFDGRLCIIGLQGGAVTEIKLNTLFPKRLTVQGAALRPRNPENKAMVVNEVEKNVWPEIVAGKVKPIIYKSFPLSEAGEAHKLMESNEHIGKILLVP

SEQ ID NO: 519 - DNA, 1020 bp, Helianthus annuus
atggtggcctcccaaataatccaagtagaatcggcggcgacgatgaaagctgtagtaatcacaactccgggaggtccagaagttctaaaactgcaagaagtagaagatccagaggtgaaagacgacgacgtattgataaaagtggaagccacagctttgaacagagccgatacacttcaacggcaagggaagtacccacccccaaagggggagagtgagtatcccggtctggaatgttctggaaccatcctatccctcggtaaaaacgtttcccgttggaaagttggtgatcaggtatgtgctcttataagtggtggaggatatgctgaaaaggtagctgtacctgctggtcaagtccttcctatcccgcctggcgtttctttgaaagatgctgccagcttccctgaggtcgcgtgcaccgtttggtcaactgtcttcatgacaagcaagctatcttccggagaaacatttctgatacatggtggttctagtggcattggtacatttgcaattcaaattgccaaatacttcggcgttaaagtgtttgtcacagcagggagcgaggaaaaattaaaagcctgtaaggatcttggagccgatgttgggatcaactacaaaacggaagattttgttgcacgtataaaggaggaaacaggcgggaaaggggttgatgttatactggataatgttggtgggccctacttccagaaaaacctggagagcttaggtatcggtggcaggcttttcatcattggttttatgggtggagtgaaagccgaagcaaatatatcattgttactggcaaaacggctcactgtgcaagctgcgggcttgagaagccgaagtatagaaaagaaagcggaaatagtgagtgatgtggagaagaatgtttggccggcaatcgcacaagggaaggtgaaacctgttgtttacaagtacttcccgttatttgaagccggagaggctcacaagcttatggaaaccagtacacatattggcaaagtactgttacttgcatga

SEQ ID NO: 520 - protein, 339 aa, Helianthus annuus
MVASQIIQVESAATMKAVVITTPGGPEVLKLQEVEDPEVKDDDVLIKVEATALNRADTLQRQGKYPPPKGESEYPGLECSGTILSLGKNVSRWKVGDQVCALISGGGYAEKVAVPAGQVLPIPPGVSLKDAASFPEVACTVWSTVFMTSKLSSGETFLIHGGSSGIGTFAIQIAKYFGVKVFVTAGSEEKLKACKDLGADVGINYKTEDFVARIKEETGGKGVDVILDNVGGPYFQKNLESLGIGGRLFIIGFMGGVKAEANISLLLAKRLTVQAAGLRSRSIEKKAEIVSDVEKNVWPAIAQGKVKPVVYKYFPLFEAGEAHKLMETSTHIGKVLLLA

SEQ ID NO: 521 - DNA, 1185 bp, Helianthus argophyllus
atggaagctctactgggctccaccactctccgcccctcactcccaccctcatccaccaccaaacccccactttctctctctacattcaccaccactacaacgacaccctatcctctcacccacaaactctcaaaatccaaccaaaacattcgcctccgagtctccgctagttctccgaaatctgcaactgaaacgacggtggatacgttcactgtgccttcggaaatgaaggggtgggtgtacgatgagtacggcggtgtggatgtgttgaagtattcgtcgaatgttacggttcctagtgtcaatgatgaccaggtgttagttaaggttgtggctgctgctcttaatcctgttgattttaaacgacggcttgggaagtttcaagcgactgattctgctttgccgacagttccagggcatgatgttgccggtgtagtggttaaggttggaaagcaagttaaaggtctgaaactaggagatgaagtatatggagatataagcgaaaaagcactcgatgggccgaagcagtcaggttctttagctgagtacaccacagtcgaagagaaactactagccttaaaacccaaaaacttggactttgtgcaggctgccagtctcccccttgcaattgagaccgcgtatgaaggtctagagcgagccggtttctctgaaggtaaatcaatcctcatcttaaacggtgctggcggagtcgggtcactcacgattcagcttgcaaagcaagtgtttggtgcttcaagagttgcggccacagcgagtacatcaaaactcgagttgctgaaaagtttaggtgctgatttagcaatcgattacaccaaagagggctttgaacaactgccagacaaatacgacgttgtttttgatgcaattgggcaaggggagaaagcggtgaaggtggtgaaggaaggtggcagtgtggtggtcctaaccggagcagtgtcaccaccagggttcaggtttgttgtgacctctaccggttcaacgttgacaaagctgaacccgtacttggagagcgggaaggtgaaggcagtgattgacccgaacagcccgtttccgattgacagggtgaaagaagctttttcttaccttgaaactggtagagctactggaaaggtggttgtatacccggtttctgaagagtatattttggagaagttggcacaataa

SEQ ID NO: 522 - protein, 394 aa, Helianthus argophyllus
MEALLGSTTLRPSLPPSSTTKPPLSLSTFTTTTTTPYPLTHKLSKSNQNIRLRVSASSPKSATETTVDTFTVPSEMKGWVYDEYGGVDVLKYSSNVTVPSVNDDQVLVKVVAAALNPVDFKRRLGKFQATDSALPTVPGHDVAGVVVKVGKQVKGLKLGDEVYGDISEKALDGPKQSGSLAEYTTVEEKLLALKPKNLDFVQAASLPLAIETAYEGLERAGFSEGKSILILNGAGGVGSLTIQLAKQVFGASRVAATASTSKLELLKSLGADLAIDYTKEGFEQLPDKYDVVFDAIGQGEKAVKVVKEGGSVVVLTGAVSPPGFRFVVTSTGSTLTKLNPYLESGKVKAVIDPNSPFPIDRVKEAFSYLETGRATGKVVVYPVSEEYILEKLAQ

SEQ ID NO: 523 - DNA, 1041 bp, Hordeum vulgare
atggaggcgctcgtggtgcggaagctcggcgatccaacgctgccgcccggcggcgaggaatctccgtttgcggcagtctccggtgaccgaccgattccagagctctcctcgccgacctcagtgcgggtgcgcgtggcggcgaccagcctcaatttcgcgacgttccttcaagtccagggcaagtaccaggagcgccccccgctgcccttcgtgccagggtccgactacgccggcgtcgtcgacgccgtcggccccggcgtacgcagacttcgccccggcgaccgcgtctgctccctcgccagcgtcgggtccttcgccgagtttatcgtcgccgacgagaaggcactatacgtagtccctgatggatgtgacctggtcgctgctggagcattacctgtggcatttggtacatcgcatttggcccttgcccacagagctcaactaaaggctggtcaggtgctacttgtacttggtgctgccggcggtgttggggtatctgctgtacagataggaaaagtttgcggtgctattgttattgcagttgccaggggagttgagaaattgcaatatctcaagtcaataggagctgatcatgtgattgactcgagcaaggagaatgttattgagagtgccaagtcctttttaaaggctagtggtctcaaaggtgtcgatgttttatatgatcctgttggtggcaagcttacccaagatagcttgaaacttctcaattggggtgcacatattctgctcattggatttgctagtggagatgttccagttattcgagctaacattgcacttattaagaactggacaattcatggtctgtactggggaagctacttaattcaccggccagcagtactcatcgactcacttaacgaactcctgtcatggctttcaaagggtttgataacagttaaaatttcacacacctacaggctcactgaggcccatctcgcttttgctgacttgagagataggaaagccgtcggcaaagtgatgattgttatgggctcctcagcaaaacaaagactctga

SEQ ID NO: 524 - protein, 346 aa, Hordeum vulgare
MEALVVRKLGDPTLPPGGEESPFAAVSGDRPIPELSSPTSVRVRVAATSLNFATFLQVQGKYQERPPLPFVPGSDYAGVVDAVGPGVRRLRPGDRVCSLASVGSFAEFIVADEKALYVVPDGCDLVAAGALPVAFGTSHLALAHRAQLKAGQVLLVLGAAGGVGVSAVQIGKVCGAIVIAVARGVEKLQYLKSIGADHVIDSSKENVIESAKSFLKASGLKGVDVLYDPVGGKLTQDSLKLLNWGAHILLIGFASGDVPVIRANIALIKNWTIHGLYWGSYLIHRPAVLIDSLNELLSWLSKGLITVKISHTYRLTEAHLAFADLRDRKAVGKVMIVMGSSAKQRL

SEQ ID NO: 525 - DNA, 1152 bp, Hordeum vulgare
atgcaagcattcctcgcctactcgatccttccgaatccatgctccaggtcatgcttcccgcgcccagcgacgcgaccccagctcctcctgtcctcggttccggcagcgaggacgagtgatgccgccaccgcaagaagatgcggtgggccgggccggagcgtggtgaccgcggcgtcatcgtccccggcggtggccgtcacggcgacggacgttcccgggacgatgaaggcttgggcgtacgaggagtatggggacgccagcgtgctcaagctcgacgaggccgtgtcggtgccggcggtgggcgaggaccaggtgctggtgaaggtggcggccgcggcgctcaaccccgttgattccaagcggcgcatgggcaagttcaaggccaccgactccccactcccgactgtgccagggtacgacatggccggagtcgtcgtcaaggtcggcagccaggtaaagaacctcaaggagggcgacgaggtgtacggccacatcagcgagaaggtcctcgagggtcccaaacagttcggctcgctggcggagtacaccgccgtggaggagaagctggtggccctcaagccaaagagcatcgacttcgcgcaggccgccggtctgccgctcgccatcgagaccgcccacgagggcctcgagagggcgggcttctccgccggcaagtccatccttgtcctcggcggcgccggtggagtcgggtcccttgtcatccagctggcgaagcaagtttacggcgcatcgaaggtggcggccacagccagcaccccgaagctggagctcctgaaaagcctgggagccgacgtggccatcgactacaccaaggacagcttcgacgacatgccggacaagtacgacgtcgtgttcgacgcagtcggccagggcgagaaggcggtcaaggtggtgaaggaaggcggcagcgtggtggtcctcaccggcgcggtcacgccgccggggttccggttcgtggtcacctccgacgggtccgtcctggcgaagctcaacccttacctcgagtccgggaaggtgaagccggtggtcgaccccaaggggcctttccccttctcccaggtcgtggaggcgttttcctacctcgagacaggaagagccgccggcaaagtggtcatttcgcctgttccatga

SEQ ID NO: 526 - protein, 383 aa, Hordeum vulgare
MQAFLAYSILPNPCSRSCFPRPATRPQLLLSSVPAARTSDAATARRCGGPGRSVVTAASSSPAVAVTATDVPGTMKAWAYEEYGDASVLKLDEAVSVPAVGEDQVLVKVAAAALNPVDSKRRMGKFKATDSPLPTVPGYDMAGVVVKVGSQVKNLKEGDEVYGHISEKVLEGPKQFGSLAEYTAVEEKLVALKPKSIDFAQAAGLPLAIETAHEGLERAGFSAGKSILVLGGAGGVGSLVIQLAKQVYGASKVAATASTPKLELLKSLGADVAIDYTKDSFDDMPDKYDVVFDAVGQGEKAVKVVKEGGSVVVLTGAVTPPGFRFVVTSDGSVLAKLNPYLESGKVKPVVDPKGPFPFSQVVEAFSYLETGRAAGKVVISPVP

SEQ ID NO: 527 - DNA, 1149 bp, Ipomoea nil
  misc_feature (579)..(579): n is a, c, g, or t
atggaagcactgctctcctccacaactcttccagtgagaagaacccttcaccctccccactctccatcctgtctttctgctgtgttcaaacttcactgcaggagcagaaaagctgcagattcttgggttcagaggactcagttatctttcagagtcttggcgagttcccaggctgcatcagctgaggcctctacagccacattattctttccctttgagatgaatgcttggacttatggagagtatggaggtgttgatgttttgaaggtggaacccagtgttgcagtgcctcagatacaagatgatcaggtgttgatcaaagttgctgctgcggctctcaatcctgttgatttcaagcgcagacagggcaagttcaaggccactgattcgcctcttcctactgtaccgggctatgatgttgctggtgtagtaatccaagttggtagtcaagtaaaaggcctaagactaggtgacgaagtttatggaaacataaatgagaaagcattggaaggacccaagcagtttggttcattaggtcagtacactgcagttgaggagaaactgctggctttgaagccnaagaatcttagttttgaacaggctgctgctcttcctcttgccatagagaccgcctacgaaggtcttgaaagggcagaattttcttctggaaaatccatcctcgtcttgggtggtgcaggaggagttggatctctcgtcattcagctcgcaaagcatgtatttggtgcttcaaaagttgcagctacatccagcactggcaagttggagttgttgaaaagcttaggcgctgatttggctattgactacacaaaggacaactttgaagacataccagacaagtttgatgtggtctatgatacagtcgggcagggagagaaggcagttaaggtggtgaaggaaggcgggagcgtggtggtgctaaccggtgcagtcacgccccccggtttcaggttcgtagtcacatccaacggagaagtgttgaagaaactcaaccctttcctagaaagtgggaaggtgaagccagtgatagaccccaagggtccatttccatttgacaaggttgcagaagcattttcttaccttgaaactggccgtgccactgggaaagttgttatacatcctattccctga

SEQ ID NO: 528 - protein, 382 aa, Ipomoea nil
MEALLSSTTLPVRRTLHPPHSPSCLSAVFKLHCRSRKAADSWVQRTQLSFRVLASSQAASAEASTATLFFPFEMNAWTYGEYGGVDVLKVEPSVAVPQIQDDQVLIKVAAAALNPVDFKRRQGKFKATDSPLPTVPGYDVAGVVIQVGSQVKGLRLGDEVYGNINEKALEGPKQFGSLGQYTAVEEKLLALKPKNLSFEQAAALPLAIETAYEGLERAEFSSGKSILVLGGAGGVGSLVIQLAKHVFGASKVAATSSTGKLELLKSLGADLAIDYTKDNFEDIPDKFDVVYDTVGQGEKAVKVVKEGGSVVVLTGAVTPPGFRFVVTSNGEVLKKLNPFLESGKVKPVIDPKGPFPFDKVAEAFSYLETGRATGKVVIHPIP

SEQ ID NO: 529 - DNA, 1047 bp, Ipomoea nil
atggaagctttagtatgcagaaagatcggcgacccaacaatccgaccgaactcggacgattctccactcacctattcaacatcccatccgatcccggaactcgtctcgccgaactcagtccgagtccgggtcaaagccacgagcttgaacttcgccaattacctgcaagtccaagggttgtaccaagagaagcctccgttgccgttcatccttggctccgattactcgggaatcgtcgacgccgtcggccccaaagtcactaaattcagggtcggcgaccgtgtgtgctcttttgccgcgcttggttcatttgcccaattcatcgtcgccgatgaatccgatttgtttcgagtgcctgatggttgtgatctagttgcggctgctgcacttcctgtggcatatggaacatcacatgtagccctagcttacagggcgcagttgcgtcagaaccaggttttgctggttcttggagcagctggaggtgttggggtttcagcagtacagattggaaaggtttgcggagctactgttattgctgctgcgaggggagctgagaaggtggattttttgaagtcgatgggtgctgatcacgtagttgatgtgagcaaggataacgttattgagaatgttagggcgtttctaaagtcaagaaagctcaggggggttgatgtcttgtatgatccagtagggggaaagctttcgaaagatagcttgaaactgttgaattggggagcacagattttggttattgggtttgcgagtggacaagtgcccgtcatcccagcaaatattgctctcgttaagaactggacaatacacggactctactggggaagccataagatacaccgcccagctgtgcttgaagattctctcaacgagctattatcttggttgtcgaggggcttgattaccataaacatctctcatactttcggcccatcagaggccaatctcgctttctctgccctcaaagataggaaggcgatcgggaaggtgttgcttacttttggcgatggcaagaccgtcgggcaatctaagctttag

SEQ ID NO: 530 - protein, 348 aa, Ipomoea nil
MEALVCRKIGDPTIRPNSDDSPLTYSTSHPIPELVSPNSVRVRVKATSLNFANYLQVQGLYQEKPPLPFILGSDYSGIVDAVGPKVTKFRVGDRVCSFAALGSFAQFIVADESDLFRVPDGCDLVAAAALPVAYGTSHVALAYRAQLRQNQVLLVLGAAGGVGVSAVQIGKVCGATVIAAARGAEKVDFLKSMGADHVVDVSKDNVIENVRAFLKSRKLRGVDVLYDPVGGKLSKDSLKLLNWGAQILVIGFASGQVPVIPANIALVKNWTIHGLYWGSHKIHRPAVLEDSLNELLSWLSRGLITINISHTFGPSEANLAFSALKDRKAIGKVLLTFGDGKTVGQSKL

SEQ ID NO: 531 - DNA, 1164 bp, Lotus japonicus
atgtttctctcagctgcactctcctccacaacttcccacctcactatcctcccttctctcatcacttccacaacctctccactttctcgcagattttcctttactttcctagaaaacagaaacccaacaaccacaacaaccctcttcccttacaagcagagactcttggtaaagtctcaggctactgcacctgcttcttctgaggcagtgaaagtgtcacctgtaccttctgagatgaaagcgtgggtctatggggaatatggcggtgtggatgttttgaaatttgattccaatgttgctgtgcctgatttgaaggaggatcaggtccttgttagagttgttgctgcagctcttaaccctgttgatgccaagagaaggcaggggaagttcaaagccactgattctcctcttccgactgttccgggctacgatgttgccggtgtggtggtgaaggttggcagtgaagtaaaggagttcagagtgggtgatgaagtatatggagatgtaaatgagaaagcactagaagggcctaagcagtttggatctctggctgagtacacagctgttgaggagaaattgttggcaccaaaacctaagaatttggattttgctcaagccgcttctcttcctcttgcaattgagactgcttatgagggtttggagagaactggattttcttctggtaaatccattcttgtcctaaatggttcaggtggagttggaagccttgttattcagcttgctaagcaagtttttggagctgcaagagttgctgcaacttcaagcactagaaatttggagcttttgaaaagcctgggagttgatttagctattgactacacaaaggagaacttcgaagacttaccagagaaatttgatgttgtttatgatgccatcgggcaatgtgacagagccgtgaaggcgatcaaagaaggtggtagtgtggtagcactcacaggtgctgttacaccacctggcttcagatttgtagtaacttccaatggaactgttctgaggaaattaaacccttatttagagagtggaaaggtgaagccaattgtagactccaaaggtccattccctttcacccaactagctgaagccttctcttaccttgaaacaaaccgagctactggaaaggttgttatacatcccatcccatga

SEQ ID NO: 532 - protein, 387 aa, Lotus japonicus
MFLSAALSSTTSHLTILPSLITSTTSPLSRRFSFTFLENRNPTTTTTLFPYKQRLLVKSQATAPASSEAVKVSPVPSEMKAWVYGEYGGVDVLKFDSNVAVPDLKEDQVLVRVVAAALNPVDAKRRQGKFKATDSPLPTVPGYDVAGVVVKVGSEVKEFRVGDEVYGDVNEKALEGPKQFGSLAEYTAVEEKLLAPKPKNLDFAQAASLPLAIETAYEGLERTGFSSGKSILVLNGSGGVGSLVIQLAKQVFGAARVAATSSTRNLELLKSLGVDLAIDYTKENFEDLPEKFDVVYDAIGQCDRAVKAIKEGGSVVALTGAVTPPGFRFVVTSNGTVLRKLNPYLESGKVKPIVDSKGPFPFTQLAEAFSYLETNRATGKVVIHPIP

SEQ ID NO: 533 - DNA, 957 bp, Lotus japonicus
atggcagcaatacccactcacatcaaagcatggacctactcagaatacggcaagagcactgatattcttaagttcgatccaaacgtgcctttacctgagttgaaggaggatcatgtcctcatcaaggtcgttgctgcagcccttaatcccattgattataagagaatggaagctttgtttaaggacacagattcccctttacccacagctccagggtatgatgttgctggagtggtggttaaggttggaagtgaagtgaagaaatttaaagttggagatgaagtttatggtgatatcaatgagaatgctctggagtatccaaaggttgttggttcattggcagagtatacagctgtagaagagaaattgttggctcacaagcctaagaatctgagctttgttgaggcagctagtcttcctttagcaattgagactgcttatgaaggccttgagcgtgctgggttttctgctgggaaatctattcttgtgcttggaggtgctggtggagttggaacccacgttattcagcttgccaagcatgtttttggcgcatctaaggtagcagctacatctagcactgggaagctggagctgttgaggaagttaggagctgacatgcctattgattatacaaaggagaacgttgaaaacctgcctgaaaagtttgatgtggtgtttgatgcagttggggacgctgacacgacattcaagcctttgaaagaaggaggcaaatttgtgacaatagtaccacctgcacttccaccaccggcaatctattacatattgaaatctgatggggctgtcttagagaaactaaaaccgtatttggaaagtggcaaggtaaagccaatacttgatcccaagagtccctttccattttcccaaactgttgaagcattttcctatctggaaactaacagagccgttggaaaagtggtcatccatcccataccatga

SEQ ID NO: 534 - protein, 318 aa, Lotus japonicus
MAAIPTHIKAWTYSEYGKSTDILKFDPNVPLPELKEDHVLIKVVAAALNPIDYKRMEALFKDTDSPLPTAPGYDVAGVVVKVGSEVKKFKVGDEVYGDINENALEYPKVVGSLAEYTAVEEKLLAHKPKNLSFVEAASLPLAIETAYEGLERAGFSAGKSILVLGGAGGVGTHVIQLAKHVFGASKVAATSSTGKLELLRKLGADMPIDYTKENVENLPEKFDVVFDAVGDADTTFKPLKEGGKFVTIVPPALPPPAIYYILKSDGAVLEKLKPYLESGKVKPILDPKSPFPFSQTVEAFSYLETNRAVGKVVIHPIP

SEQ ID NO: 535 - DNA, 978 bp, Lotus japonicus
atgaaggctgtagtgataaccacaccgggaggcccccaagtgctgcagctccaagacgtggaagacccccacctcggcgacggcgaagtccttatcagagtccacgccaccgcccttaacagagccgatacccttcaaaggaaaggcgcttaccctccccctaaaggtgcaagctcctacccaggtcttgagtgctccggcaccgttgaatccatcggcaaacacgtttcccggtggaaaatcggcgatcaggtttgtgctcttcttgctggaggtggatatgctgagaaagttgctgttcctcaggaacagattcttccggttccgcctggggtttctttgacggatgcagctagtttccctgaggttgcatgcactgtgtggtctactattttcatgatgagtcgcctcactcaaggagaaaccttgttgattcatggaggttccagtggaattggtacatttgcaattcagattgccaagtatcgcggagcaagagtatttgtcactgcaggtagtgaggagaaactagctttttgtaaaggtataggagctgatgtgggtatcaactacaaaactgaggactttgttgcgagggtaaaggaagaaactggtggtcaaggtgttgatgttattcttgattgtatgggagcatcctactataaaagaaatcttgatagcttaaactttgatggaaggctttttattattggctttcaaggggggacttctaccgaagtagatctccggcctttagttgccaagcgtcttactgtacaaggggctggcttgcgtaacagaagtattgaaaataaagctgtgatagttactgaagtggagaagaacgtttggcctgcaattgcagaaggaaaggttaagcctgtgatctacaaatctttcccactttctgaagcagctgaggctcaccagcttatggaaagcagccatcatattgggaagatattgcttttgacatga

SEQ ID NO: 536 - protein, 325 aa, Lotus japonicus
MKAVVITTPGGPQVLQLQDVEDPHLGDGEVLIRVHATALNRADTLQRKGAYPPPKGASSYPGLECSGTVESIGKHVSRWKIGDQVCALLAGGGYAEKVAVPQEQILPVPPGVSLTDAASFPEVACTVWSTIFMMSRLTQGETLLIHGGSSGIGTFAIQIAKYRGARVFVTAGSEEKLAFCKGIGADVGINYKTEDFVARVKEETGGQGVDVILDCMGASYYKRNLDSLNFDGRLFIIGFQGGTSTEVDLRPLVAKRLTVQGAGLRNRSIENKAVIVTEVEKNVWPAIAEGKVKPVIYKSFPLSEAAEAHQLMESSHHIGKILLLT

SEQ ID NO: 537 - DNA, 987 bp, Lactuca perennis
atggttaaagcaattaggattcatgaatttggtggccctgaggtgatgaaatgggatgaattgaatataggcgaaccgaaaaacggagaaatcaaagtgaaaaacaaggcgattgggataaactttttggatgtttacattcgtaaaggtttagtccctggtttatctcctccattgccattcacaccaggtatggaagctgccggagttgtaacagaagttggtcccggagtcaccacttgcaaaatcggagacgttgtcgcttacgccggctaccctgtctccgcttacgctgaagaacagatacttccggcagatagagctgtcctggttccaccttcaattgatccaatcgtcgccgcttctgttctcttcaagggactaaccgccgaacttctggttcgccggtgctttaaggtcgaaccagggcacacggttcttgtccatgccgccgccggtggagtcggatcattgctgtgtcaatgggcgaacgcacttggtgcgactgtcatcggaactgtttcaaacaaaacgaaggcagtgcaagcgaaggaagacggatgccaccatgtgattgtttacaaagaagaaaacttcgtggatcgagttatggagattacttcaggagaaggtgttgatgtagtctacgatggtattggtaaagagacattcgagggatctgctgcgtgcttaaagtttcgtgggttcttgatttcaattggtgggccttcgggctcagccgacccgttaagattcaaactggtggcccaaaagtctttgtacttcacgattccttctgtgatgctttatacagaaaaaagagaagatcttcttgcagcatcagaagaggttttctctaatgtcgaaaagggtattttacgtgttcgtgtaaatcataagtatcctttgtcgcaagtgggtcaagcccattttgaccttgagaatcggaaaacaaccgggtctattgtgttgatacccgacccttaa

SEQ ID NO: 538 - protein, 328 aa, Lactuca perennis
MVKAIRIHEFGGPEVMKWDELNIGEPKNGEIKVKNKAIGINFLDVYIRKGLVPGLSPPLPFTPGMEAAGVVTEVGPGVTTCKIGDVVAYAGYPVSAYAEEQILPADRAVLVPPSIDPIVAASVLFKGLTAELLVRRCFKVEPGHTVLVHAAAGGVGSLLCQWANALGATVIGTVSNKTKAVQAKEDGCHHVIVYKEENFVDRVMEITSGEGVDVVYDGIGKETFEGSAACLKFRGFLISIGGPSGSADPLRFKLVAQKSLYFTIPSVMLYTEKREDLLAASEEVFSNVEKGILRVRVNHKYPLSQVGQAHFDLENRKTTGSIVLIPDP

SEQ ID NO: 539 - DNA, 1206 bp, Lactuca saligna
atggaagctctgctgagctcctcggcaactctacgactccggccaccgctttctggttccttctcatccaaaccctcgcttcctcactctacattcactccccccgccatcaaaacctcaagaaattttcctttttctcgcaaaaactcacaatctaaaccgcacccttgtttccgagtctgcgcgagttcttcttcgagatctgcaactgaaaccgctatcgattcttcagcagttccttctgagatgaaagcctgggtgtacgatgaatatggtggtgttgatgtactgaaattctcttcgaatgtcacggtgccagaagttaacgacgaccaggttttggtaaaggttgtggctgcggcacttaatcctgttgatttcaagagacggcttggtaaatttcaggccacagattccgccctaccgactgttccaggatacgatgtcgccggagtggtggttaaagtcggaagccaagtaaaaagcttgaaagtaggagatgaagtatacggagacataagcgagaaggcactcgatggacctaaacagtcaggctctttagccgagtacaccgccgttgaggagaaactgctctctttgaagccaaaaagcttagatttcgcacaggctgcgagtctccctcttgcagttgaaaccgcatatgaaggtctagagagagccggtttctcgaaaggtaaatcaatccttgtcttgaatggtgctggtggagttggatcgcttgtgattcagcttgcgaagcaagtatttggtgcttcaaaagtagctgcaacagctagtacatcaaaactcgaactgctgaaaagcttaagtgctgatttagcaattggttacacgaaagagaacttcgaagacttgccagataaatacgatgttgtatttgatgcaaatggacaaggggagaaagcggtgaaagtggtggtggaaggcggcagtgtggtggtgttaaccggtgcagtgacaccaccagggtttagatttgtggtgacgtcaacaggttccactttgactaaattgaatccgtatttggaggatgggaaggtgaaggctgtacttgacccaaatggtccgtttccgtttgaccgggtcaaagaagcttttgcataccttgaaactggtcgagctactggaaaggttgttgtatatcctgtttcagaagattatattttggaaaaaatcgcaaaataa

SEQ ID NO: 540 - protein, 401 aa, Lactuca saligna
MEALLSSSATLRLRPPLSGSFSSKPSLPHSTFTPPAIKTSRNFPFSRKNSQSKPHPCFRVCASSSSRSATETAIDSSAVPSEMKAWVYDEYGGVDVLKFSSNVTVPEVNDDQVLVKVVAAALNPVDFKRRLGKFQATDSALPTVPGYDVAGVVVKVGSQVKSLKVGDEVYGDISEKALDGPKQSGSLAEYTAVEEKLLSLKPKSLDFAQAASLPLAVETAYEGLERAGFSKGKSILVLNGAGGVGSLVIQLAKQVFGASKVAATASTSKLELLKSLSADLAIGYTKENFEDLPDKYDVVFDANGQGEKAVKVVVEGGSVVVLTGAVTPPGFRFVVTSTGSTLTKLNPYLEDGKVKAVLDPNGPFPFDRVKEAFAYLETGRATGKVVVYPVSEDYILEKIAK

SEQ ID NO: 541 - DNA, 942 bp, Lactuca serriola
atgatgaaggcatggcagtatcacgaatatggcagcgttgaagtcttgaaattggctactgatgtggcgattcctgaaatcaaagatgatcaggtattggttaaggttgttgctgctgctcttaacccagtcgattacagaaggaggcttggacagatgaaggccgccgatccgcctcttccggttattccaggattagatgtggcaggggtagttgtgaaggttggaagcaaggtaaaaggactgaaagaaggagatgaagtatatggagatgtaaacgaaaaagctctggataaacctacaaagttaggaactttagcagaatacgttgctgttgacgagaaattgctggctttgaaacccaaaaacttggattttgttgaagctgctgctcttcctcttgcaattgagactgcatacgaaggtctagaaagggccaatttcaaagaaggtcaatcaatccttgttcttaatggtgctggtggtgttggatccttcataattcagattgcaaaacatgtgtttggggcttcgaaagtagctgccacatctagtactaaaaaacttgagttacttaagagtcttggagctgatttagccatcgattacaccaaacagaaattcgaagaactcccagataaatacgatgttgtctacgatgcgatagggcaaccggaggaagctgtgaaagcagttaaggaaggtggttgtgcggtgtccataaccgatttcgaaaagcctattccgccacccgggttcggcttcgtgctcacgtctagtggatccatgttaacaaaactaaacccttacctagaaagcggaaaggtgaagccattgctcgacccaagaactcctttcccttttgaaaaggttaaggaggctttcacttaccttgagagccatagggccacaggaaagatagttatttacccgatatcgtga

SEQ ID NO: 542 - protein, 313 aa, Lactuca serriola
MMKAWQYHEYGSVEVLKLATDVAIPEIKDDQVLVKVVAAALNPVDYRRRLGQMKAADPPLPVIPGLDVAGVVVKVGSKVKGLKEGDEVYGDVNEKALDKPTKLGTLAEYVAVDEKLLALKPKNLDFVEAAALPLAIETAYEGLERANFKEGQSILVLNGAGGVGSFIIQIAKHVFGASKVAATSSTKKLELLKSLGADLAIDYTKQKFEELPDKYDVVYDAIGQPEEAVKAVKEGGCAVSITDFEKPIPPPGFGFVLTSSGSMLTKLNPYLESGKVKPLLDPRTPFPFEKVKEAFTYLESHRATGKIVIYPIS

SEQ ID NO: 543 - DNA, 981 bp, Malus x domestica
atggcggctgctgtagcttcaagtgattcagtttccataccatctgtaaacaaggcgtgggtgtactcagagtacggaaagtctgcagatgttttgaagttcgatccgaatgttcctgttcctgaaataaaggaagaccaggtgctgatcaaggtggttgctgcatctctcaacccagttgatttcaaaaggatgcttggctacttcaaggactctgactcttcaccccctacagttccagggtatgatgttgctggtgtggtggtgaaagtaggaagccgggtgacaaagtttaaggtgggggatgaagtatatggggatctcaacgagaaggctctcgataagccgaaaaagatcggatctttggccgagtacactgctgcagaagaaagagtgttagctctcaagccaaaaaatctgagttttgttgaagctgctagccttcccctggccattgagactgcctatgaagggctcgaacgagttgaattctctgccggtaaatccatccttgttttgggaggcgctgggggagtcggaacacatgttattcagctagcaaagcatgtgtttagtgcttcaaaagtagcagctacagcgagcacgaaaaaactcgatcttttgagaagcttgggtgctgatttggctattgattacaccaaggagaacttcgaagacctgcctgagaaattcgatgtggtttatgatgcagttgggcagagtgacagggcattgaaggcggtgaaggaaggcgggaaggttgtgacaatcgtaggtccagtaacgccaccggcaatcatatttgtgcttacttcaaccggagctgtattagagaaactgaagccttacttggagagtgggaaggtgaagccggtgcttgatcccacaggcccgtatccattttcgaagactgttgaagcatttgcctatcttgaaacctccagagctgccggaaaggtggttgtgtatcccatcccatga

SEQ ID NO: 544 - protein, 326 aa, Malus x domestica
MAAAVASSDSVSIPSVNKAWVYSEYGKSADVLKFDPNVPVPEIKEDQVLIKVVAASLNPVDFKRMLGYFKDSDSSPPTVPGYDVAGVVVKVGSRVTKFKVGDEVYGDLNEKALDKPKKIGSLAEYTAAEERVLALKPKNLSFVEAASLPLAIETAYEGLERVEFSAGKSILVLGGAGGVGTHVIQLAKHVFSASKVAATASTKKLDLLRSLGADLAIDYTKENFEDLPEKFDVVYDAVGQSDRALKAVKEGGKVVTIVGPVTPPAIIFVLTSTGAVLEKLKPYLESGKVKPVLDPTGPYPFSKTVEAFAYLETSRAAGKVVVYPIP

SEQ ID NO: 545 - DNA, 1170 bp, Malus x domestica
atgttaaccaccaccgccgctctcacctccactgcttctcaactcacatcaccaaaccaaatttctcccagattttccttcactttccgggaaaataacaacagaatcgcggtacccaaaagttcgaccacccaaagatccaagctttcagttggttttcccgctctgagagtgtctgctagttcccggtctgcccctgcttcggctgaggcgtcaaaggtcacggttctgccgtcggagatgaaggcgtgggtttatggggaatacgggggtgttgatgttttgaagttcgacaccaaagttgcggttcctgagttgctggaggaccaggttctggttaaggttgtcgctgcggctctcaacccggttgacttcaagaggaggcagggcaagttcaagaacactgattctcctcttccgactgttccaggctatgatgttgccggcgtggtggtgaaggttggcagtaaagtgaaggactttaaagagggggatgaagtgtatggagacatacatgagaaagcattggaagggcctaaacaatctggctctcttgcagagtacactgctgttgaagagaggttactggcaccaaagcccaagaatttggattttgctcaggctgcttcacttcctcttgcaatcgagacagcttatgagggtcttgaaaagaccgggttttctgccggtaaatctttgcttgttctgaatggtgctggtggagttggaagcctagtgattcagctagcaaaacatgtatttggagcttcacgaatagcagccacttcaagcactggaaagctggagttattgaagagcttgggtgctgatttagcgatcgactacactaaggagaacttggaagaattgccggaaaaatttgatgtcgtctatgatgctattggtcaatgtgacaaagcagtgaaggtggtgaaagaagggggcagtgtggtggccttaacaggtgcagtaacacctccgggtttcagattcgtggttacttccaacggagcagttctgaagaaactaaacccgtacttagagactgggaaggtgaagcctgtgatagaccccaaagggcccttccccttctccaagcttgtggaggctttctcttaccttgaaacaaatcgggccaccggaaaggtagtcatacatccaattgaatga

SEQ ID NO: 546 - protein, 389 aa, Malus x domestica
MLTTTAALTSTASQLTSPNQISPRFSFTFRENNNRIAVPKSSTTQRSKLSVGFPALRVSASSRSAPASAEASKVTVLPSEMKAWVYGEYGGVDVLKFDTKVAVPELLEDQVLVKVVAAALNPVDFKRRQGKFKNTDSPLPTVPGYDVAGVVVKVGSKVKDFKEGDEVYGDIHEKALEGPKQSGSLAEYTAVEERLLAPKPKNLDFAQAASLPLAIETAYEGLEKTGFSAGKSLLVLNGAGGVGSLVIQLAKHVFGASRIAATSSTGKLELLKSLGADLAIDYTKENLEELPEKFDVVYDAIGQCDKAVKVVKEGGSVVALTGAVTPPGFRFVVTSNGAVLKKLNPYLETGKVKPVIDPKGPFPFSKLVEAFSYLETNRATGKVVIHPIE

SEQ ID NO: 547 - DNA, 1206 bp, Marchantia polymorpha
atggcgggagttgtaacagctggcgtcggcgggaatgtggctgtgctcgcgggccagtgcgatggccgccaacgacgacggcgctcgtcgtcgtcgtgcaaggcatcgatgtcgctcgtgcccgcgacgaagtttggtggcgcggtgggattgcggacgaaggagaatggagggcgagcatggcggagggagttgaattccagcgccgtgcttggcgtcagagcggagattcgcactgaggaggcctcggcggattctgttgccatggccattccccagacgcagcaagcttgggtttaccaggcctatggcgagaaggaagtgatgagtattggtgaggttgctgtgccggaattgaaccccgaccaagtgctgatcaaggtctgtgcagcggctctcaatcctgtcgactctaagcgacggggtggaaagtttcaggccacagattcggatcttcctattgtaccgggatacgattgttcaggtatagtggtgaaagtgggaagtgaagtgtccaagtttaaggtcggtgatgaggtttatggagacacttccgagttctgcctcaacggtcccaaacagtacggaactctcgcacagtacacagcagccgaggagaagctgcttgcgaagaagcctcagagtctcacttttgccgaagctgcgagcttacctttggcgcttcagactgcctatcaaggttggcaaaaggcaggtatcaaggagggacacaaggtgatggtcctcggaggtgccggaggtgtaggcactttggcgattcagttggccaagcaagtcttcaaggcatcgtccgttgcagcgacggcaagtactggcaaggtcgatcttttgaaaagcttgggcgcagacgttgtcgttgactacaccaagcaaaagctggaagaatggccagagaaatacgatgttgtgtacgataccgttgggaagggtgagggaacgaaggtcgtgaagcctgatggtggactggttgtcattacgggacctgtagagccgccaggctttagatacgtgattgtgtccaagggttctgacttggaagagctgaacccttacttcgaaactggatcaatgcaagccgtactcgaccctcaaggtttatttcccttcaccaaagttgtggaggcatttggttacctggaaacgggccgagcttttggcaaagtcgtgatctctccaattgaatag

SEQ ID NO: 548 - protein, 401 aa, Marchantia polymorpha
MAGVVTAGVGGNVAVLAGQCDGRQRRRRSSSSCKASMSLVPATKFGGAVGLRTKENGGRAWRRELNSSAVLGVRAEIRTEEASADSVAMAIPQTQQAWVYQAYGEKEVMSIGEVAVPELNPDQVLIKVCAAALNPVDSKRRGGKFQATDSDLPIVPGYDCSGIVVKVGSEVSKFKVGDEVYGDTSEFCLNGPKQYGTLAQYTAAEEKLLAKKPQSLTFAEAASLPLALQTAYQGWQKAGIKEGHKVMVLGGAGGVGTLAIQLAKQVFKASSVAATASTGKVDLLKSLGADVVVDYTKQKLEEWPEKYDVVYDTVGKGEGTKVVKPDGGLVVITGPVEPPGFRYVIVSKGSDLEELNPYFETGSMQAVLDPQGLFPFTKVVEAFGYLETGRAFGKVVISPIE

SEQ ID NO: 549 - DNA, 1047 bp, Marchantia polymorpha
atggagcgcgaaacgatccgagctctggtggtgaggtcgctgggggatccgaagacgccgctgtcggacaagaattgccctgtttctgagatgcagtggccgcggccggctctgacctcgccgacgtcggtgcgagtgaaagtgaaggtcacgagtgtcaatttctccactgtgctccaaattcagggcctctatcaggagaaacccaagcttccttacgttcctgggggcgatttttccggagtggtcacggaggctggggcgaaggtgacgcacgtgaaagtcggcgaccgagtgtgtggattcgtcaactatggcagcttcgccgaggaattcgtcgcggatgagtctgaaatgttccttataccgagcggatgcgacttggtagctgctggagctcttccggtggcatttggcacgtctcatattgcgcttgatcaccgtgccaatcttcgtcccgggcaggtcttgctggtgttaggtgctggaggtggtgtcggcttagctgctgtggaacttggtaaattgatgggagccatcgtcatagccgtggcaaggggcaaggagaaggtcgaccttctgaggtccactggagcagatttcgttctggattcatctgaagatgggatcataaagccagtgcaggcatttctcaaatcaaaaaaactcagaggagttgacgttctgtatgacccagtcggtgggaagcagcataaagaggcattaaagctggtgaaatggggagggcagatccttgtaatcgggttcgcaagtggagaaatccccagcattccagctaacatagcactcgtgaagaattggacagtgcacgggctctattggggaagttacgttatccatcaacctcatattcttcgcgattccatgaagcagttgctgagatgggcggcagagggcaagctcgacgtgcacatctctcatcaattccctctttctcacgccaatttggctttcgcaactgttatggatagaaaagccattggaaaagtgatattcactttggaggacaaaccatcccgactttga

SEQ ID NO: 550 - protein, 348 aa, Marchantia polymorpha
MERETIRALVVRSLGDPKTPLSDKNCPVSEMQWPRPALTSPTSVRVKVKVTSVNFSTVLQIQGLYQEKPKLPYVPGGDFSGVVTEAGAKVTHVKVGDRVCGFVNYGSFAEEFVADESEMFLIPSGCDLVAAGALPVAFGTSHIALDHRANLRPGQVLLVLGAGGGVGLAAVELGKLMGAIVIAVARGKEKVDLLRSTGADFVLDSSEDGIIKPVQAFLKSKKLRGVDVLYDPVGGKQHKEALKLVKWGGQILVIGFASGEIPSIPANIALVKNWTVHGLYWGSYVIHQPHILRDSMKQLLRWAAEGKLDVHISHQFPLSHANLAFATVMDRKAIGKVIFTLEDKPSRL

SEQ ID NO: 551 - DNA, 963 bp, Medicago truncatula
atggcaagcacaccaagtattccatctcatacaaaagcttgggtttactctcaatatggtaacatagaagagattctaaagtttgattctaatgtacctacaccacacccaaaagaagatcaagtgctcatcaaggtggttgctgctgcccttaatcctgttgatattaagagggctcttggtcatttcaaggacattgactctcctttgccgactgtaccaggatatgatgttgctggtgtggtggttagtgtgggagagcaagtgaagaaatttaaggttggagatgaagtttatggtgatatcaatgagattactttacacaatccaaaaactattggtactttgtcagagtatactgttgctgaagaaaaagtacttgctcacaaaccatcaaatttgagttttgttgaagctgctagtctccctttagcaatcattactgcttatcaaggtcttgaaagagttgaattttcttctggtaaatctctacttgttcttggaggtgctgggggagttggatctcttgttattcagctagccaagcatgtttttgaggcatctagaattgcagctactgctagcacaacaaaactagattttttgaggaaattgggagcagacttggcaattgattatactaaggagaattatgaagaacttactgaaaagtttgatgtggtgtatgatgcagtaggtgatagtgagagggcagtgaaggctgccaatgaaggaggaaaagttgtgacaatactaccacctggaactccaccagctatccctttcttactcacttcagatggagctgtattagagaaattgcaaccttatttggaaaatggcaaagtgaaaccaatattggaccctaagagtccctttccattttatcagactttggaagcattttcctatctcaatactaatagagctattgggaaaatagttattcatcccattccatga

SEQ ID NO: 552 - protein, 320 aa, Medicago truncatula
MASTPSIPSHTKAWVYSQYGNIEEILKFDSNVPTPHPKEDQVLIKVVAAALNPVDIKRALGHFKDIDSPLPTVPGYDVAGVVVSVGEQVKKFKVGDEVYGDINEITLHNPKTIGTLSEYTVAEEKVLAHKPSNLSFVEAASLPLAIITAYQGLERVEFSSGKSLLVLGGAGGVGSLVIQLAKHVFEASRIAATASTTKLDFLRKLGADLAIDYTKENYEELTEKFDVVYDAVGDSERAVKAANEGGKVVTILPPGTPPAIPFLLTSDGAVLEKLQPYLENGKVKPILDPKSPFPFYQTLEAFSYLNTNRAIGKIVIHPIP

SEQ ID NO: 553 - DNA, 969 bp, Micromonas RCC299
atgaaggtcgagcacgactaccccgtgcccaagctccagcccggcggcgtcctcgtcaagaacaagtactccggcatcaacttcatcgacacctatcaccgcagcggcctgtacaagcgcgagctccccttcatcggcggccaggagggcggcggtttcatcgccgccgtctcccccgaggccgaggcccagggcgtcaaggtgggagaccgcgtcgcgtactcttccgtcttccagacctacgcagagtacaccgccgtgcccgccaacaaggttgtcaccgtgcccgaggaggtgcccctcgacgtggcggtctcctgtggggtccagggcatgaccgcgcactacctcacgcacagcgcgcacgcggggctcgtcaagcccggcgagtggatgctcatccacggcaccggatccggcacctgccagtgggcggcgcagatggccaagctccgcgggtacaaggtgatcggcacgtgctccgagtcgaagcaggacatcgccagggccaccggcgtggacgagctcatcgtgtacaaggaggcgcagggaacctcgtacgaggattacacctccgtcgacctcgttcccaaggttatggagatcaccggcggcgagggtgtcaaggcggtcatcgacggcatcggcctcgccacctgggagacctccatcgaggtgctcgcgaggcgcggcatcttcgtgtcgttcggcaacgcatccggcgccgtgcccgcgttccccccgctcaggttcatcaacaagtccgggttcctcaccaggcccaagcttaacgattacaccgtgacccgcgaggagctcatgtcccgcgccaacgacatctacggctggctcgccaagggcgaactcaaggtggtggtcgaccgctgcttccccctcgagcaggccaaggagggccacgactacctcgaggctggtaagtcccgcggcaaggtgctctacgagatctaa

SEQ ID NO: 554 - protein, 322 aa, Micromonas RCC299
MKVEHDYPVPKLQPGGVLVKNKYSGINFIDTYHRSGLYKRELPFIGGQEGGGFIAAVSPEAEAQGVKVGDRVAYSSVFQTYAEYTAVPANKVVTVPEEVPLDVAVSCGVQGMTAHYLTHSAHAGLVKPGEWMLIHGTGSGTCQWAAQMAKLRGYKVIGTCSESKQDIARATGVDELIVYKEAQGTSYEDYTSVDLVPKVMEITGGEGVKAVIDGIGLATWETSIEVLARRGIFVSFGNASGAVPAFPPLRFINKSGFLTRPKLNDYTVTREELMSRANDIYGWLAKGELKVVVDRCFPLEQAKEGHDYLEAGKSRGKVLYEI

SEQ ID NO: 555 - DNA, 1140 bp, Micromonas RCC299
atggctcggcagtcataccacgcgggagcgataaggggcgaaccgcgcgaccgtgcgcgcgagagcgggacgcggatgagggcggtgttgtgccgggcgctcggggatccgaccaaaccccgatccgaggggggcgcgttgggggtggaggacgttccatcgccgagatgcgcgcgcgacggggtcaaggtgagggtcgaggcggcgagtctgaacttcgccgacgtcttgatggtccagggctcgtaccaggagaagccccacatgccattcattccgggcggcgagtgcgcgggcgtcgtcaccgagtgcggcgccgacgtccgcggactcaaggtgggcgaccgcgtcgcgggggtgacgatgggcgggggcgcgatggcggaggagtgcgtcatccccgagcgcatgtgcttcccggtgcccgcgggcgtgagcctcgcgcaggcggccgcgttcccggtcgccttcgggaccgcgcacctcgccctcacccgatacgcgcgggtcacgccgggccagacgacggtgctcgtcctgggcgccgcgggcggcgtcggtctcgcggcggtgcaggtggccaaggcgctaggcgccgtcgtcgtcgccgtcgcgaacggcgccggtaagatgcgagcgctcgaagacgcgggcgcggaccaccgcatcgacgccacgaccctgcactcgaatggaggcggcgcgcgcgaggacgattacgcggggctcaaggcggcggtggcgaccctcacacccgggggaatagacgtcatgttcgacgtcgtcggcggtgaaggtttcgcgcagggactgcggtgcgttaaatggggcggcgtcgcgctcgtgatcgggttcgccagcggggacgtcccgcgtctcgcgatgaacgtcccgctggtgaagaacctgtcggtgcgcggcgtgtactggggctcgcacgcggcgcacgctccggaagagttgggcaagtcgctgagggaggtttactcgatgctcgcggatgggcgatgtcgggtccgggtgagtcacgcgttcggcctggacgacgcgcacgaggggtttcggacgatcgcggagcgacgggcggtggggaaggtggtggtgacgcccgcggggaagcgcgcggcgtcgaggctctga

SEQ ID NO: 556 - protein, 379 aa, Micromonas RCC299
MARQSYHAGAIRGEPRDRARESGTRMRAVLCRALGDPTKPRSEGGALGVEDVPSPRCARDGVKVRVEAASLNFADVLMVQGSYQEKPHMPFIPGGECAGVVTECGADVRGLKVGDRVAGVTMGGGAMAEECVIPERMCFPVPAGVSLAQAAAFPVAFGTAHLALTRYARVTPGQTTVLVLGAAGGVGLAAVQVAKALGAVVVAVANGAGKMRALEDAGADHRIDATTLHSNGGGAREDDYAGLKAAVATLTPGGIDVMFDVVGGEGFAQGLRCVKWGGVALVIGFASGDVPRLAMNVPLVKNLSVRGVYWGSHAAHAPEELGKSLREVYSMLADGRCRVRVSHAFGLDDAHEGFRTIAERRAVGKVVVTPAGKRAASRL

SEQ ID NO: 557 - DNA, 1167 bp, Nicotiana tabacum
atggaagctctgttatcttccactactcttcaactcaaaccccttcaccctccctcttctttctcttctcttcattctccattttcttcatgttctgtgcttagattaaagggtagtagaaaagctgaaaattacattcaaaggagccaattttccactgttttgccacttagagtttctgctagttctcaagctgcccctgttgaaacatccacaagcacttctattccttctgaaatgaaggcttggacttacactgaatatggaagtgctgatgttttgaagtttgagtccaatgtttcagttccagaaattaaggaagatcaagtcttgattaaggttgttgctgctgctcttaatcctgttgattttaagcgtcggctcggaaaattcaaggccactgattctccacttcctactgtgccaggttatgatgttgctggtgtggtagtgaaagttggtagtgaagtaaaggggctaaaagaaggggatgaagtttacggagatatacatgaaaaagcattagatggaccaaagcaatttggatctttagctgagtacactgctgtagaagagaaactagttgctttgaaacccaagaatctgagttttgcagaggctgctagtcttcctctagcaattgaaactgcttatgaaggtcttgagaaagctggattctctgctggcaaatccatacttgttttgggaggtgctggtggtgttggatcccttgtaattcaggttgcaaaacatgtatttggagcttcaaaagtagcagctacatccagcacagggaagttggaactcttgaaaagcttaggagttgatttagctattgattacaccaaggagaattttgaacatcttcctgagaagtttgatgtcgtttatgatacagttggtcagggcgaaaaggcggtgaaggcagtgaaagaaggtggaagtgtggtagtgctaacaggggcagtaacagcaccaggttttagatttgtagtgacatcaaatggagagatgttgaagaaactgaacccatacttagaaaatgggaaggtgaaaccagttattgattcaaaaggaccattcccatttgataaggttgtggaagctttctcttatcttgaaactggcagagctactggaaaagttgtcattcatcccattccttga

SEQ ID NO: 558 - protein, 388 aa, Nicotiana tabacum
MEALLSSTTLQLKPLHPPSSFSSLHSPFSSCSVLRLKGSRKAENYIQRSQFSTVLPLRVSASSQAAPVETSTSTSIPSEMKAWTYTEYGSADVLKFESNVSVPEIKEDQVLIKVVAAALNPVDFKRRLGKFKATDSPLPTVPGYDVAGVVVKVGSEVKGLKEGDEVYGDIHEKALDGPKQFGSLAEYTAVEEKLVALKPKNLSFAEAASLPLAIETAYEGLEKAGFSAGKSILVLGGAGGVGSLVIQVAKHVFGASKVAATSSTGKLELLKSLGVDLAIDYTKENFEHLPEKFDVVYDTVGQGEKAVKAVKEGGSVVVLTGAVTAPGFRFVVTSNGEMLKKLNPYLENGKVKPVIDSKGPFPFDKVVEAFSYLETGRATGKVVIHPIP

SEQ ID NO: 559 - DNA, 978 bp, Nicotiana tabacum
atgaaggctgtagtgataacaagtccaggtggaccagaggtgttgcagatacaacaagtggaagacccacaaatcaaagaagatgaagtgttgatcaaaatagcagctactgcccttaatagagctgacacccttcagcgccaaggtaaatacccaccccctaaaggtgacagtgaataccctggtcttgaatgttctggcactgttgaagccgtcggcaaggatgttactcgctggaaaattggtgacctggtatgtgctctcattggtggtggaggttacgcggagaaagtagctgtacctactggacaagttcttcctgttccatcaggtgtttctttacaagatgcagctagttttcctgaggtggcatgtactgtttggtcaactgtcttcatgacgagcaagctttcctcgggtgaaacgttcctgatacatggaggctctagcggaattggtaccttttccattcaaatggctaagtgccttggagtcaaaatttttgtcacagcaggaagtgaggaaaaacttgttgcatgcaaagaacttggtgctgatgtttgcatcaattataagactgaagactttgttacccgcatcaaggaggaaacaggagggaaaggtgttgacgtcatactagataatataggaggttcatacttccaacaaaacctcgacagcctcaatgttgatggtaggctcttcattattggttttatgggaggcacagtgacacaagtaaatcttgccggtttgttagcaagacgcctgacagtgcaggctgctggcttgcgtagtagaagcgcaaaaaacaaagctcaaattgtgagagaagtggagaagaatgtttggccagcaattgcagcaggcaaggtgaaaccggtggtgtacaagtacttccctttagcagaagctgctgaggctcatcagttaatggaaagcagcaagcacattgggaagattttgcttactgtttaa

SEQ ID NO: 560 - protein, 325 aa, Nicotiana tabacum
MKAVVITSPGGPEVLQIQQVEDPQIKEDEVLIKIAATALNRADTLQRQGKYPPPKGDSEYPGLECSGTVEAVGKDVTRWKIGDLVCALIGGGGYAEKVAVPTGQVLPVPSGVSLQDAASFPEVACTVWSTVFMTSKLSSGETFLIHGGSSGIGTFSIQMAKCLGVKIFVTAGSEEKLVACKELGADVCINYKTEDFVTRIKEETGGKGVDVILDNIGGSYFQQNLDSLNVDGRLFIIGFMGGTVTQVNLAGLLARRLTVQAAGLRSRSAKNKAQIVREVEKNVWPAIAAGKVKPVVYKYFPLAEAAEAHQLMESSKHIGKILLTV

SEQ ID NO: 561 - DNA, 1098 bp, Oryza sativa
atgtggtggagggccgcgagggctcgccggcggatcgccggggcgcgggcggcgtccacgtcggcggcggcggcgggggagaagagctgccgcgccgtggtggtgcctcggttcggagggccggaggtgctggaggtgaggcagggggtgccggtgcccgatctgaagccgggggatgtgctcgtgcgcgcgcgggccgtctccatcaaccctctggacctgcgaatgcggtctggttatgggcgttcaatatttgagccagtcctacctctgatcattggccgggatataagtggtgaagttgcagctacagggacttctgtgtcgtcctttactattgggcaagaagtgtttggtgctttgcatccaacagccataagagggacatacaccgattatgcaattctttcacaggatgagcttacttccaaaccatctacactcagtcatgtggaggctagcgctataccatttgctgctttgactgcatggcgtgctttacatggtacggctcgaatttctgaaggacaaagagtacttgtgattggtggaggtggggctgttgggctagctgctgttcagcttgcagtagctgcagggtgtagcgtttctgcaacctgtggaactaaaagtattgaacaagtgttggccgctggtgctgaaaaagctatcgattacactgctgaggatactgaatcagcagttaaaggaaagttcgatgccgtgttggataccataggagtacctgaaactgagagaattggcattaatgttctgaggagaggcggacactatatgacccttcagggagaggcggctgccctagcagatagatatggattagctgtgggacttcctgctgctactgctgttttactaaagaaacaaatgcagtaccgttattctcatggaatagattattggtggacatacatgagagctgactctgaaggacttcatgagatacagaggctgtctggagctgggaaattgcagataccggtggagaagacatttcccatcagcaaagtaagagaagctcacgaggccaaggagaaaaggctggtgcctggcaaggtggttttagaatttgactag

SEQ ID NO: 562 - protein, 365 aa, Oryza sativa
MWWRAARARRRIAGARAASTSAAAAGEKSCRAVVVPRFGGPEVLEVRQGVPVPDLKPGDVLVRARAVSINPLDLRMRSGYGRSIFEPVLPLIIGRDISGEVAATGTSVSSFTIGQEVFGALHPTAIRGTYTDYAILSQDELTSKPSTLSHVEASAIPFAALTAWRALHGTARISEGQRVLVIGGGGAVGLAAVQLAVAAGCSVSATCGTKSIEQVLAAGAEKAIDYTAEDTESAVKGKFDAVLDTIGVPETERIGINVLRRGGHYMTLQGEAAALADRYGLAVGLPAATAVLLKKQMQYRYSHGIDYWWTYMRADSEGLHEIQRLSGAGKLQIPVEKTFPISKVREAHEAKEKRLVPGKVVLEFD

SEQ ID NO: 563 - DNA, 1173 bp, Oryza sativa
atgcaatccctcctctcctcctcggtgctcgccaacccatgcaccaccggctccccgctcttcccgccgaccgctgctaagctcgccgccgctgcctcggtcccggtggccgcggcggcgaggagtggcgccattgctgccgtgtcgaggagatcggccagtggcggccggtgcgtggtggcggctgcgtcgtcgtcgtccccggcggtgaccacggcggaggccggcgaggtgcccgcgacgatgaaggcgtgggcgtacgacgattacggggacggcagcgtgctcaagctcaacgacgccgcggcggtgccggacatcgccgacgaccaggtgctggtgcgcgtcgccgccgccgcgctcaaccccgtcgacgccaagcgccgcgccggcaagttcaaggccaccgactcccctctcccgacggtgccggggtacgacgtggccggcgtggtggtgaaggccgggaggaaggtgaaggggctgaaggaaggggacgaggtgtacggcaacatcagcgagaaggcgctggaggggcccaagcagtcggggtcgctggcggagtacaccgccgtggaggagaagctgctggcgctcaagcccaagagcctcggcttcgcgcaggccgccgggctgccgctcgccatcgagaccgcccacgagggcctcgagcgcgccggcttctccgccggcaagtccatcctcatcctcggcggcgccggcggcgtcggctccctcgccatccagctggccaagcacgtgtacggcgcgtccaaggtggcggcgacggcgagcacgcccaagctggagctcctcaagagcctcggcgccgacgtcgccatcgactacaccaaggagaacttcgaggacctgccggacaagtacgacgtcgtcctcgacgccgtcggccagggcgagaaggccgtcaaggtggtgaaggaagggggcagcgtggtggtgctcaccggcgccgtcgtgccgccggggttccggttcgtggtcacctccgacgggtcggtgttggagaagctcaacccatacctggagtccgggaaggtgaagccgctggtggaccccaaggggccattcgccttctcacaggttgtggaggccttctcctacctcgagacagggagagccaccgggaaagttgtcatctcacccattccatga

SEQ ID NO: 564 - protein, 390 aa, Oryza sativa
MQSLLSSSVLANPCTTGSPLFPPTAAKLAAAASVPVAAAARSGAIAAVSRRSASGGRCVVAAASSSSPAVTTAEAGEVPATMKAWAYDDYGDGSVLKLNDAAAVPDIADDQVLVRVAAAALNPVDAKRRAGKFKATDSPLPTVPGYDVAGVVVKAGRKVKGLKEGDEVYGNISEKALEGPKQSGSLAEYTAVEEKLLALKPKSLGFAQAAGLPLAIETAHEGLERAGFSAGKSILILGGAGGVGSLAIQLAKHVYGASKVAATASTPKLELLKSLGADVAIDYTKENFEDLPDKYDVVLDAVGQGEKAVKVVKEGGSVVVLTGAVVPPGFRFVVTSDGSVLEKLNPYLESGKVKPLVDPKGPFAFSQVVEAFSYLETGRATGKVVISPIP

SEQ ID NO: 565 - DNA, 1068 bp, Ostreococcus taurii
atgcgagcggtgcatcaagccggctggggcggccgcgagcgactgtcggtgcgagaccttcctcgacccgtgccggacgtcggtagcgtcttggtgcgagtgatggcggtgtcgatccacgccggcgatcatcacatgttgtcgggacgtccgtatgttattcgattgctcgggcggcgggacgtgcccggcatggatttcgcgggcgtcgtggagacggtcggcggtcccgccgtcggcggcggtggcgacgcagacaccgtcctcgcgccaggcgatcacgttctgggcacggctgacgttcgatgcggcgcgttcgcggagttcgtgtgcgtcccgttgggaaacgtcgtgctaaagccggcgaacgtcacgtgggaagaagccgcggcgattcccacctcggcggagacggcgttgcaggctttgcgctcgggtggcatcggcaactccgaaaaggttaagtcgggacacagagttctgatcaatggcgggtccggcggcgtcggctcgttcgcggtgcagctcgcgaaacatttcggtgcgcgcgtcacggcggtttgctccactcggaacgtcgagctcgtgtcgtctttgggcgctgatgaggtgatagactacaccgaagagacgattgaaggctactccaaggcgcacggaaacgtcaagtacgacacaatcatcgacgccgtcggtcggtactcgtggcggcgtttactcgccccttccggcgtgcttgtcgccgtttcgcttcccgatccagagacggagtgtgtcccgtgcggtttgtgccacgtcgcgtgcttctcgtccttctgctgctgctgtcttttctcgagaaagtccaagccgttcatgcagacggtgtctgcgcacgacttgagtttcttggcaaatttggtgcgcgacgggaaaatacgaccggtgatcggtctcaaactcgagggcctcgacgcgattccagacgccctcgccaatcactttgatgcgtcgaactcgttcggacgcggacaccgcgtcggtaagacggtcgtcagtctctcaaaggcacacgcgacctcaccttga

SEQ ID NO: 566 - protein, 355 aa, Ostreococcus taurii
MRAVHQAGWGGRERLSVRDLPRPVPDVGSVLVRVMAVSIHAGDHHMLSGRPYVIRLLGRRDVPGMDFAGVVETVGGPAVGGGGDADTVLAPGDHVLGTADVRCGAFAEFVCVPLGNVVLKPANVTWEEAAAIPTSAETALQALRSGGIGNSEKVKSGHRVLINGGSGGVGSFAVQLAKHFGARVTAVCSTRNVELVSSLGADEVIDYTEETIEGYSKAHGNVKYDTIIDAVGRYSWRRLLAPSGVLVAVSLPDPETECVPCGLCHVACFSSFCCCCLFSRKSKPFMQTVSAHDLSFLANLVRDGKIRPVIGLKLEGLDAIPDALANHFDASNSFGRGHRVGKTVVSLSKAHATSP

SEQ ID NO: 567 - DNA, 1080 bp, Picea glauca
atggattctcctcaatctggcacaatgcaagcgttaatctgcagaaaattaggagaccctactgctcccatctcagaaacctcccccatattcctctcgtctcatcaccctgttcctcaattgacctcaccaacctcggttcggatcagaatcaaggccattagtgtaaattatggaagtgctttgcagatcatgggcaagtaccaggagaaaccccctcttccctttgtcctgggttctgatttctccggtgttgtggaagctgtggggaagggagtcaccagggttaaagttggggacggagtctgtacaattacagggcaggatagttatgcagagaaagttgttgtggatgagaaagatctgtttgtggttcctccagaatgtgatttgattgctgctggtgggcttccagtagcttttggtacttcacatcttgggcttgttcaccgagcaggaatttgtcgtggccaggttttgcttgtccttggagcagcaggtggtgtagggttgtcagctgtgcagataggaaaggtttgcggggcaatcgtaattgcagtagcaaggggacctgaaaaagaacgtcttctcaagtcattaggagctgaccatgtggtcgactctacaagcggcaatatagtacctaatgtcagggaatacttgaagtcaagaaaccttaagggagttgatgttctctatgatcctgtagggggaaggctcttgaaagacagcttgaagcttttaaactggggagctaagattttggtcataggatttgcaagtggagagattcctatcatccctacaaatattaccctcgtaaagaactggacggtacatggactctattggggaagctacaaaatacatcaaccagacgttttggtagattccatgcaagagcttctatcatggttagcgaaaggcttgatacatattaacgtgtctcatacattcaggctgtcagaggcaaaccttgcatttgcggcaattattcaaagaaaagttattggaaaggtcatgatcacctttgaagataatgcattcgttgatgaaaaatcagcgagatcaaaactttga

SEQ ID NO: 568 - protein, 359 aa, Picea glauca
MDSPQSGTMQALICRKLGDPTAPISETSPIFLSSHHPVPQLTSPTSVRIRIKAISVNYGSALQIMGKYQEKPPLPFVLGSDFSGVVEAVGKGVTRVKVGDGVCTITGQDSYAEKVVVDEKDLFVVPPECDLIAAGGLPVAFGTSHLGLVHRAGICRGQVLLVLGAAGGVGLSAVQIGKVCGAIVIAVARGPEKERLLKSLGADHVVDSTSGNIVPNVREYLKSRNLKGVDVLYDPVGGRLLKDSLKLLNWGAKILVIGFASGEIPIIPTNITLVKNWTVHGLYWGSYKIHQPDVLVDSMQELLSWLAKGLIHINVSHTFRLSEANLAFAAIIQRKVIGKVMITFEDNAFVDEKSARSKL

SEQ ID NO: 569 - DNA, 978 bp, Picea glauca
atgaaagcggtggtgataacaactccaggagatgcagatgttctgcaaatacaagacgtagatgaccctcaactcaatgatgatgaagtcctgataaaagtctcagcagcagcactgaacaggtcagatatctcccagagactaggtcagtaccctccacccaaaggggtacggccttatcccggcgtcgaatgctcaggcgttatcgaagctgtcggaaaagatgtacagaagtgggaagttggcgacgaggtttgtgcacttttgggaggtggagggtatgcagaaaaggtggcagttcactctgggcatgtcttgcctatacccaaaggcatttcattacaagaagctgcagcgcttcctgaggtggcatgtacggtgtggtctacagtttttatgacaagtcatctgtctcttggtgagaactttctggtacatggaggctctagtggcattggaacatttgctattcagatagccaagtattgtggagcaagagtgtttgttacagctggaagcaaggaaaaattggcacgttgtaaggagcttggtgctgatgtggcaataaattacaaaacagaagatttcgttgaacgtgtaaaagaagaaacaggaggaaaaggtgttgatgtaatattggacaacatgggcggtccttatcttcagaggaatttagatgctttgggccttgatgggagactatttgtcatcggttttcaagggggttttattacagagatcaacttgtcaactatatttggaaagcgccttactattgaagctgcgggcttgcggactcgctctgtagagaacaaagagcaaatcatcgctgatgttcagaagcatatttggcctgcatttgaagaaggaaaagtgaagcccatcatccacacgacacttcctttgtcacaagctgcagaggcccacaggattatggaatccaacacacatactggaaaaatcctgctcattgtttag

SEQ ID NO: 570 - protein, 325 aa, Picea glauca
MKAVVITTPGDADVLQIQDVDDPQLNDDEVLIKVSAAALNRSDISQRLGQYPPPKGVRPYPGVECSGVIEAVGKDVQKWEVGDEVCALLGGGGYAEKVAVHSGHVLPIPKGISLQEAAALPEVACTVWSTVFMTSHLSLGENFLVHGGSSGIGTFAIQIAKYCGARVFVTAGSKEKLARCKELGADVAINYKTEDFVERVKEETGGKGVDVILDNMGGPYLQRNLDALGLDGRLFVIGFQGGFITEINLSTIFGKRLTIEAAGLRTRSVENKEQIIADVQKHIWPAFEEGKVKPIIHTTLPLSQAAEAHRIMESNTHTGKILLIV

SEQ ID NO: 571 - DNA, 945 bp, Physcomitrella patens
atggcagtgcccaaggttcacaaggcgtgggtgtaccatgagcttggccctgccaaggacgtgctcaagtttgaagaggtcgctgtgcctgaagtgaagccaaatcaggtccttatcaaggtgaaggctgcggccatcaaccctgtcgacaacaagcgccgaactggctaccttggggataaggattctccacttccgattgtgccaggatatgactgtgctggagtggtggtgaaattgggcgatcaagcctccaagttcgaagtggacgacgaggtgtatggcatgacttctgaaattcctgtcgtgcatcccaagcagtggggcactctggcatcctacacagcttgcgaggacaaatttcttgcactgaagcccaaaaacttgagttttgaagaggctgcgagcctaccccttgccatcctcaccgctaccgaaggactccagaaagctggctgcgaagaaggcaagacggtgcttgttcttggtggatccggcggagtcggcacacatgttattcaggttgccaagcacgtcctcaaggctgctcacgtaacaacaacaggaagttcaaagaagaccgaatttctaaaaaatcttggagcagacgaggttcttgactatcactctacggattatacccagaagcccgaacgctatgacgttgtctatgacactgtcggtgaaggcccaactaaaggagtcaaagtgttgaaggatggaggtgtgcttgtgtccattcttaccaaagaccctgccttccggcatgttgtgcaatcaaaggccgaggtgctggagatgttgaatccgtatctggagagtggagccgtgaaacccatcatcgaccccgaaggaaggttcaagttctcggaagtggtgcaagcttatgagtatttggaggctgggcatgctactgggaaagtgaccatttctcccatagagtga

SEQ ID NO: 572 - protein, 314 aa, Physcomitrella patens
MAVPKVHKAWVYHELGPAKDVLKFEEVAVPEVKPNQVLIKVKAAAINPVDNKRRTGYLGDKDSPLPIVPGYDCAGVVVKLGDQASKFEVDDEVYGMTSEIPVVHPKQWGTLASYTACEDKFLALKPKNLSFEEAASLPLAILTATEGLQKAGCEEGKTVLVLGGSGGVGTHVIQVAKHVLKAAHVTTTGSSKKTEFLKNLGADEVLDYHSTDYTQKPERYDVVYDTVGEGPTKGVKVLKDGGVLVSILTKDPAFRHVVQSKAEVLEMLNPYLESGAVKPIIDPEGRFKFSEVVQAYEYLEAGHATGKVTISPIE

SEQ ID NO: 573 - DNA, 1044 bp, Physcomitrella patens
atgagagctttagtttgccgcaagctgggtgatcccactctaccgttttccgacacatcccccatctacgtagaggagaacttccccaagccgaagctgtcttctcctacttctgtgcgtgtgaaggtcttcgcatccagtctgaatttcgcaaccggtttgcaaatcgagggaaaataccaggagaagcctcctttgccctacgtccctggagaagatttctccgggacagttctggaagtgggtgatcgtgtgactaaagtgaaagtaggagatgctgtttgtggggctgcaacgggtggggcttatgctgcggagatcgtcattgatgcatccttggtgtttaaggtgcccaatggatgcgacctcctgcaggctggtgggcttccgattgcgtttggtacatcccatgtaggattggtgcatcgtgcgaatcttcaagcaggccaggtgcttttggtgctgggcgcagcagggggagtgggattatccgctgtgcagattggcaaacttttgggtgcggttgtaattggtgttgctaggggccacgataaagcagagctgctaaaagcatatggagttgatcttgttgtggatcccaaagatggtgggctcatcaacaccgtaaaagcattcctgaagtcccgaaagctcagaggcgtagatgttctttatgatccggttggtgggaagctcttcaaagacagcatgaagcttttgagctggggagctcacattgtcatcatcgggtttacgagtggtgaaatccccagcattcctgctaacattttactcgttaagaacttgactgttcatggcttgtactggggaagctacactcgattcaacccacaagttatgcaagactctatggaagccttgcttgggtatttgacaaacggcagtctgcgcgtccacatttctcacacgttctcgatcgatgaggccaacaaagcctttgcattgttgaagcaacgtgaagtaaagggaaaagtgatgatattacctggagggagttcttccagccctgcatcaaaactgtag

SEQ ID NO: 574 - protein, 347 aa, Physcomitrella patens
MRALVCRKLGDPTLPFSDTSPIYVEENFPKPKLSSPTSVRVKVFASSLNFATGLQIEGKYQEKPPLPYVPGEDFSGTVLEVGDRVTKVKVGDAVCGAATGGAYAAEIVIDASLVFKVPNGCDLLQAGGLPIAFGTSHVGLVHRANLQAGQVLLVLGAAGGVGLSAVQIGKLLGAVVIGVARGHDKAELLKAYGVDLVVDPKDGGLINTVKAFLKSRKLRGVDVLYDPVGGKLFKDSMKLLSWGAHIVIIGFTSGEIPSIPANILLVKNLTVHGLYWGSYTRFNPQVMQDSMEALLGYLTNGSLRVHISHTFSIDEANKAFALLKQREVKGKVMILPGGSSSSPASKL

SEQ ID NO: 575 - DNA, 1050 bp, Physcomitrella patens
atgcagtcgacgagaaagggagcgggtattgggggtagtgcacgggctgcgatatacattgacaatgagatttacacagaggaggcagagacacagggatcggtgacatctctaccaaccacgcagaaagggtggacttacagtgagtatggatcgaaagacgtcctgaaattcgaggacattccaatgcccgaggtgaagccagacgaagttttagtgaaggtgcaagctgcagcgctcaatcccgtggattccaaacggatgtcggggaaattcaagaacacggattctgagcttcctcatgtacccggctacgacgttgcgggagtagttgtgaaagtaggctccgacgtgaccaagttcaaggagggtgacgaagtttacgccgacgtttccgaagctccattgaacaatcctaggcaggttggatcattggcacaattcactgcggttgaggagaagcttctagtaatcaagcccgctaacttgagttttgctgaagcagcaagccttcctcttgcggttctaactgcccaagaagcactggatagggctggccttacggaaggacaaactatatttattaacggaggagctggaggtgttggaagtctagccatccagttggcgaagaatgtgtacggagcatcacaagtgacaactacggcaagcactggaaagttggaattcgtgaagagtctcggagcagacaaagtcattgattataagaacgaaaaattcgaggaagtctcggagaagtatgatgtcgttttagattgtgttggagaatgcgccaaatgcgtgaagattgtgaaggagggcggtgcagttatcgcgttgacaggagccctggagcctccgggtgttcgctttgtggtcacttccaatggcgaaagtctggctaggttaaccccttaccttgaaagtgggaaagtgaagcccattattgatcccaagggccctttcaaattttcagagttggttgaagcatttgagtacctcgacacaggacgagcaactggaaagatcgttgtagcacccatcgaatga

SEQ ID NO: 576 - protein, 349 aa, Physcomitrella patens
MQSTRKGAGIGGSARAAIYIDNEIYTEEAETQGSVTSLPTTQKGWTYSEYGSKDVLKFEDIPMPEVKPDEVLVKVQAAALNPVDSKRMSGKFKNTDSELPHVPGYDVAGVVVKVGSDVTKFKEGDEVYADVSEAPLNNPRQVGSLAQFTAVEEKLLVIKPANLSFAEAASLPLAVLTAQEALDRAGLTEGQTIFINGGAGGVGSLAIQLAKNVYGASQVTTTASTGKLEFVKSLGADKVIDYKNEKFEEVSEKYDVVLDCVGECAKCVKIVKEGGAVIALTGALEPPGVRFVVTSNGESLARLTPYLESGKVKPIIDPKGPFKFSELVEAFEYLDTGRATGKIVVAPIE

SEQ ID NO: 577 - DNA, 987 bp, Physcomitrella patens
atgaaggcgataatcattgagggtggcggaggcccggaggtattgaagctcaaagaagtggacgatcctatagcgggagaaggagaggtgttgatcaaggtcgctgcagcggctctcaaccgagcagatgtcatgcagcggtcggggcactatcctcctcctccgggcgcttcgttgattcctgggctcgaatgctcgggtactatcgaagccgtcggtcatggcgttacgcaatggaaagtcggagacgaggtctgcgctctgcttggagggggaggctacgccgagaagatcaatgtaccagcagttcaagtgtttccggtgcccaagggaatttcattgcagcacgccgcagccatacccgaagttgcgtgcacggtgtggtcaacaatctttatgacgtgccacctgaagaagggtgaaactcttctgattcacggcggcggtagtggcattggaacgtttgccattcagatcgcaaaggcgaaaggtgtcaaggtgttcgtcacgggcggaagcgaggaaaagctgaagaaatctcgtgagctcggggctgacatcggcatcaactacaagaccgaggattttatggaacgctgcaaagctgaaacggatgggaaaggtgtggacgttatcttggacattatgggagcgtcttatctaccgaggaacatcaaagctcttgcaatggacggtcgcctgttccacattgccactcaaggaggcgaagtaggcgaaatcgatctcaacgccgtcatctaccgacgtctcaccgtggcaggggcgggattgcgagggagatcgacggagaagaagggggaaattgtgcaggacgttttgaagaacgtttggccggagattgaatccggcaaggtgaaggtcgtgatttataatgctctgcccttggcggaagcatccaaagctcacgaaatcctcgaatccggttcccatttcggcaaagttttgctactcgttggaaatgcgtaa

SEQ ID NO: 578 - protein, 328 aa, Physcomitrella patens
MKAIIIEGGGGPEVLKLKEVDDPIAGEGEVLIKVAAAALNRADVMQRSGHYPPPPGASLIPGLECSGTIEAVGHGVTQWKVGDEVCALLGGGGYAEKINVPAVQVFPVPKGISLQHAAAIPEVACTVWSTIFMTCHLKKGETLLIHGGGSGIGTFAIQIAKAKGVKVFVTGGSEEKLKKSRELGADIGINYKTEDFMERCKAETDGKGVDVILDIMGASYLPRNIKALAMDGRLFHIATQGGEVGEIDLNAVIYRRLTVAGAGLRGRSTEKKGEIVQDVLKNVWPEIESGKVKVVIYNALPLAEASKAHEILESGSHFGKVLLLVGNA

SEQ ID NO: 579 - DNA, 1089 bp, Physcomitrella patens
atgtcggaggtcttgtttctcgcgcttaggcgttggggagcttcagcgaaatctgacattcgtactctgacgacatgcagagcggtagtcttgcctcgatttggaggccccgaggttcttcaagtgcgggatgattccatacttccagacctgggcgcatctgatgtgctggtgcgtacacatgcagtgggcgtcaatccattggatatgcggatgagggaagggtacgggcggtcattgtttgagccacttttgccactagttctcggccgggatgttagtggagaggttacggcggttgggagcaatgtgagacagcttcttgtaggggatcaggtgtttggagcattacatccaactgcaacacgtggaacctacagtgattacgcaattctcggggaagaacaactggccccgaagcctgagtcactttctcacactgacgctgctgctattccattcgcctcactcaccgcctggagagctttaagaagcactgcaaagattcagaaggggcagaaagtcctgatcatgggaggtggaggtgctgttggccttgctgcgattgctttggccaaagctgcagggtgctatgttgcctgcacatgtggcaagaggagtatggagaaagtaaaggaggcaggggctgaggaagctgttgattacacttctcctaatgtgaaaggtgaatttcaagacaggtttgatgttgtgctggacacaattggtgtgcccgagactgagaccactggcatcagccttctgctacggggtggacagtacatgactctgcaggggcaaacagtaaccttcacagataaatatggcctcatagtagggggtgctgctgcagcagttgcattgcttcagaagcagatgcagtacaaacaatcacatggaattgactactggtggcccattatgcgaacagatgccgagggcctggaggagatatgtagactggcatcagatgggcgacttaaaattcctgtgggtctgacttttccattggagatggcagcagaagcgcatcgagcaagggatagcaagaatgctggtggtaaagttgttctaaaagttgatgtttag

SEQ ID NO: 580 - protein, 362 aa, Physcomitrella patens
MSEVLFLALRRWGASAKSDIRTLTTCRAVVLPRFGGPEVLQVRDDSILPDLGASDVLVRTHAVGVNPLDMRMREGYGRSLFEPLLPLVLGRDVSGEVTAVGSNVRQLLVGDQVFGALHPTATRGTYSDYAILGEEQLAPKPESLSHTDAAAIPFASLTAWRALRSTAKIQKGQKVLIMGGGGAVGLAAIALAKAAGCYVACTCGKRSMEKVKEAGAEEAVDYTSPNVKGEFQDRFDVVLDTIGVPETETTGISLLLRGGQYMTLQGQTVTFTDKYGLIVGGAAAAVALLQKQMQYKQSHGIDYWWPIMRTDAEGLEEICRLASDGRLKIPVGLTFPLEMAAEAHRARDSKNAGGKVVLKVDV

SEQ ID NO: 581 - DNA, 972 bp, Prunus persica
atggctgcagcttcaagtgattccataccctctgtaaacaaggcttgggtgtactcagaatatggaaaggctgcagatgttttgaaacttgatcccaatgttcctgttcctgaaataaaggaagaccaggtgctcatcaaggtggttgctgcagctcttaacccagttgattataagaggatgtttgggtattttaaggccactgactctcctctacctacggttcccgggtatgatgttgctggtgtggtggtgaaggtgggaagccaagtaacaaagtttaaggtgggggatgaagtatatggggatctcaatgagaaagctttggagaacccaacaaggtttgggtctttggcagagtacactgctgcagcagaaagagttttggctctcaaaccccaaaatctgagttttattgaagctgctagccttcccctggctattgagactgcctatgaagggcttgaacgaactgaattttctgctggtaaatccattcttgttttaggaggcgctgggggagtgggaacacatgttgttcagctagcaaagcatgtttttggtgcttcaaaagtagcagcaactgcaagcactagaaaactggagctgttgagaagcttgggtgctgatttggctgtcgactacaccaaggagaagtatgaagaactgcctgagaaatttgatgtggtatatgatacagttggggagtctgatagggcagtgaaggcagtgaaagaaggagggaaggtagtgacaatagtaccaggtccagtagcagcaggggccttcatatttatactgacttcaactgggactatattggagaagctgaagccatacttggagagtgggaaggtgaagccggtgcttgatcccacaagcccatatcccttttccaagactgttgaagcatttgcttaccttgaaacctccagggctacagggaaggtggttgtgcatcccatcccataa

SEQ ID NO: 582 - protein, 323 aa, Prunus persica
MAAASSDSIPSVNKAWVYSEYGKAADVLKLDPNVPVPEIKEDQVLIKVVAAALNPVDYKRMFGYFKATDSPLPTVPGYDVAGVVVKVGSQVTKFKVGDEVYGDLNEKALENPTRFGSLAEYTAAAERVLALKPQNLSFIEAASLPLAIETAYEGLERTEFSAGKSILVLGGAGGVGTHVVQLAKHVFGASKVAATASTRKLELLRSLGADLAVDYTKEKYEELPEKFDVVYDTVGESDRAVKAVKEGGKVVTIVPGPVAAGAFIFILTSTGTILEKLKPYLESGKVKPVLDPTSPYPFSKTVEAFAYLETSRATGKVVVHPIP

SEQ ID NO: 583 - DNA, 981 bp, Prunus persica
atgatgaaggccgtagtgataacaactccaggtggaccagaggtcctcaagctacaagaggttgcagacccagaactcaaagaagatgaagtcctgatcaaagtcgcggccacggcgctgaaccgagccgacacgttgcagaggaaaggggcgtacccgccacccccgggttccagcccctacctgggtctcgaatgttctggaaccatcgaggccgttggggaacacgtctcacgctggcaagtcggtgatcgggtgtgtgctcttcttagtggaggagggtatgctgagaaggtggccgttccagctggacaagtttttcccgtcccgccgggtatttctttgaaggatgctgctagctttcctgaggtggcatgcactgtttggtcgactgtttttatgatgagtcggctatctgccggtgaaacgtttttggttcatgggggctccagtggaattggtacatttgcaattcagatagccaaataccagggagtaagggtgtttgtcacagcaggaagtgaggaaaagttagctgtttgcaaggagcttggagctgacgtgtgcatcaattacaagaccgaggactttgttgcacgggtaaaggaagaaacaggtggcaaaggtgttgatgttatcttggatagcattggggcaagctactttcggcggaaccttgacagcttaaattttgatgggaggctttttgtcattgggatgttgggtggtgctgttacagaaatagatctccgtgttgtgctttcgaggcgtctcaccatccaagcggctggcttgcggtacagaagtccagaaaacaaagcggaaattgctagggaggtggagaacaatgtgtggcctgcaattgttgccggcagggtgaagactgtgatctacaagtcttttccactatctgaggcagcagaagctcaccggctcatggaaagcagccagcatattggaaagatactgcttgttgcgtga

SEQ ID NO: 584 - protein, 326 aa, Prunus persica
MMKAVVITTPGGPEVLKLQEVADPELKEDEVLIKVAATALNRADTLQRKGAYPPPPGSSPYLGLECSGTIEAVGEHVSRWQVGDRVCALLSGGGYAEKVAVPAGQVFPVPPGISLKDAASFPEVACTVWSTVFMMSRLSAGETFLVHGGSSGIGTFAIQIAKYQGVRVFVTAGSEEKLAVCKELGADVCINYKTEDFVARVKEETGGKGVDVILDSIGASYFRRNLDSLNFDGRLFVIGMLGGAVTEIDLRVVLSRRLTIQAAGLRYRSPENKAEIAREVENNVWPAIVAGRVKTVIYKSFPLSEAAEAHRLMESSQHIGKILLVA

SEQ ID NO: 585 - DNA, 969 bp, Prunus persica
atggctgcagctttaagtgattccataccctctgtaaacaaggcttgggtgtactcagaatatggacagtctgcagatgttttgaaatttgatccaaatgttgctgtgcctgaaataaaggaagaccaggtgctcatcaaagtggttgctgcatctcttaacccaattgatttcaagaggatgcttgggtatttcaaggagatcgactctcctccacctacggttcctgggtatgatgttgctggtgtggtggtgaaggtgggaagccaagtgacgaagtttaaggtgggggatgaagtatatggggatctcaatgagaatgctttggtgaacccaaaaaagtttgggtctttggcagagtacactgcttcagaagaaagagtgttggctctcaaaccccaaaatctgagttttgttgaagctgctagccttcccctggctctggagaccgcctatgaagggcttgaacggactgagttttctgctggtaaatctattcttgttttaggaggcgctgggggagtgggaacacatgttattcagctagcgaaacatgtttttggtgcttcaaaagtagcagctactgcaagcactaaaaaactggatttgctgagaagcttgggtgctgatttggctattgattacaccaaggataactttgaagacctgcctgagaaatttgatgtggtatatgatgcagttgggcagtctgacagggcagtgaaggcagtgaaagaaaacgggaaggttgtaacaatctttggttcagtaacgccaccagcgctcacatttgtgctgacttcaactgggactatattggagaagctgaagccatacttggagagtgggaaagtgaagccggtgcttgatcccacaagcccatatcccttttctaagactattgaagcatttgcctaccttgaaacctccagagctacaggaaaggtcgttgtgcatcccatcccttaa

SEQ ID NO: 586 - protein, 322 aa, Prunus persica
MAAALSDSIPSVNKAWVYSEYGQSADVLKFDPNVAVPEIKEDQVLIKVVAASLNPIDFKRMLGYFKEIDSPPPTVPGYDVAGVVVKVGSQVTKFKVGDEVYGDLNENALVNPKKFGSLAEYTASEERVLALKPQNLSFVEAASLPLALETAYEGLERTEFSAGKSILVLGGAGGVGTHVIQLAKHVFGASKVAATASTKKLDLLRSLGADLAIDYTKDNFEDLPEKFDVVYDAVGQSDRAVKAVKENGKVVTIFGSVTPPALTFVLTSTGTILEKLKPYLESGKVKPVLDPTSPYPFSKTIEAFAYLETSRATGKVVVHPIP

SEQ ID NO: 587 - DNA, 1197 bp, Picea sitchensis
atggatacatttgctgccactactatcactgcacgcacttgtataaactcctttcccagagccggtggtgcagatgatgtccaatcccatgtgaaattcggcaaaatcggcttcggatggaaccaacgtggtcaatcttcatacaaacttagacataagagcagtaatagaacgagaggaagcaggggagtctcggtctatgcaatggcggattcagcagcagcagtggaccaaaaaactgaaaaattcgtggtgccgtctgtgcagaaggcctggatttataaggaatatggggctgccaaggacgttttgcagttggacgatggggttccggtgccagaggtgaaagaagatcaagttctcattaaagtctgcgcggcggcactcaatcccgtcgactttaagaggcggcaagggaaatttaaagccactgactctcctcttcccacagtcccgggctatgacgttgctggcatagtgataaaagtaggtagcaaagtggaagggttcaaagaaggtgatgaagtgtatggagacataaatgaaaaagctctagataaccccaagcaatatggttcacttggtgaatatacagctgtggaagagaagttggttgctttaaagccgaaaaacttagattttactcaggcagcaagtcttcctcttgcaattttaactgcatatgaaggccttgaaagagcaggttttggtcctggaaaatccattcttgtgttaggaggtgcaggtggagtaggaagtcttgtcatacagttagcaagaaaagtttttggtgcatcaaccattgctgcaacttcaagcactgggaaactggaattcttgaagagcttgggcactgatatttccattgattacactaaacaaaattttgaagaactgcctgagaagtatgatgtcatttacgatgccgttgggcaatgtgacaaggcagtgaaggcaataaaaggaggaggaagcgttgtggctttgacaggagctgtgacaccaccaggtttcagatttgttgtcacctcaaatggctcagttctttccaaactgaatccatatttagaaagtggagaaataaaacctattattgatccaaaaggctccttttccttctcccagttggttgaagccttttcctaccttgaaacatgcagagctactggtaaagtagtcatttctcccattccttga

SEQ ID NO: 588 - protein, 398 aa, Picea sitchensis
MDTFAATTITARTCINSFPRAGGADDVQSHVKFGKIGFGWNQRGQSSYKLRHKSSNRTRGSRGVSVYAMADSAAAVDQKTEKFVVPSVQKAWIYKEYGAAKDVLQLDDGVPVPEVKEDQVLIKVCAAALNPVDFKRRQGKFKATDSPLPTVPGYDVAGIVIKVGSKVEGFKEGDEVYGDINEKALDNPKQYGSLGEYTAVEEKLVALKPKNLDFTQAASLPLAILTAYEGLERAGFGPGKSILVLGGAGGVGSLVIQLARKVFGASTIAATSSTGKLEFLKSLGTDISIDYTKQNFEELPEKYDVIYDAVGQCDKAVKAIKGGGSVVALTGAVTPPGFRFVVTSNGSVLSKLNPYLESGEIKPIIDPKGSFSFSQLVEAFSYLETCRATGKVVISPIP

SEQ ID NO: 589 - DNA, 942 bp, Picea sitchensis
atgagtaaacttcagaaggcgtggttctacaacgaatatggatccatagacgtgttgcaattcggagaagttcctgtgccaacgccggggccaggccagcttctggttaaaatccgagctgctgctctcaatcccgtcgactttaagaggcgggatggcttattcagaaacaaggattccgactttccggctgtgccgggctgtgatgcggcaggagtggtggtcgaagttggcgatggcgtttccaagttcaagaatggagatgaggtctacagcgacatccaggacttcggagcaggcaggccaaagcaatgggggactctcgcccagtacaccgtagtggaggaatacctggtggcgccgaagcccacaaatttatcgttcgaggaagcggcgagcctgccgcttgcgctcctgactgcgcagcaggcgttcgatatagccaaatttgaaaaggggaagagcgtgttcattgtgggaggagcgggcggagtgggcagcctggccattcagctggcgaggcatgtctatggagcttccaagattgtttccacggctagtactgggaagctcgacttcgtgaagagcctcggggcagatctggtcatcgattataccaagcagagctacgatcagatctctgagaaatttgatttcgtgtttgataccataggggattcggccaagtctcatgtggtagccaaagaggaagcaaaaattgtggacatagctacgtttcaacctacttccagagttgaaagaatcttagtatcaccccacgccaaaaacctgcagaagctgcagccgtacatagagagtgagaagctgaaacccgtgatcgatccgaagagcccgtactcattctctgacgttatagaggccttcaaacatcaggaaagcggacgagccagaggaaagatcgtcatttcgcccatcgaataa

SEQ ID NO: 590 - protein, 313 aa, Picea sitchensis
MSKLQKAWFYNEYGSIDVLQFGEVPVPTPGPGQLLVKIRAAALNPVDFKRRDGLFRNKDSDFPAVPGCDAAGVVVEVGDGVSKFKNGDEVYSDIQDFGAGRPKQWGTLAQYTVVEEYLVAPKPTNLSFEEAASLPLALLTAQQAFDIAKFEKGKSVFIVGGAGGVGSLAIQLARHVYGASKIVSTASTGKLDFVKSLGADLVIDYTKQSYDQISEKFDFVFDTIGDSAKSHVVAKEEAKIVDIATFQPTSRVERILVSPHAKNLQKLQPYIESEKLKPVIDPKSPYSFSDVIEAFKHQESGRARGKIVISPIE

SEQ ID NO: 591 - DNA, 978 bp, Picea sitchensis
atgaaggcagtggtgataacaactccaggagatgcagatgttctgcaaatacaagatgtagatgatcctcaagtcaaggacgatgaagttctgataaaaatatcggcaacggcattgaatagggcagataccctccaaaggcgaggttcctaccctccgcccaaaggcgcaccgccttatcttggccttgaatgctcaggcattattgaagctgttggcaaaaatgtacagacctggaaagttggcgatgaggtttgcgcacttctgggaggaggagggtatgcagaaaaggtggcagttctgtctggtcatgtcttgcctgttccaaaaggaatttcattacaagaagctgcagcccttcccgaggtggcatgcactgtgtggtctacagtttttatgacaagtcatctgtccaaaggagagaactttctggtgcatggaggctctagtgggattggaacgtttgctattcagatagccaagtattatggagcaagagtgtttgttacagctggaagcgaggaaaaattagcacgttgtaaggagcttggtgctgatgtggcaataaattacaaaacagaagattttgttgcacgtgtaaaagaagaaacaggaggaaaaggtgttgatgtaatattagatagtatgggcgcctcttatcttcaaaggaatttagatgctttgggcctcgatgggagattatttcttattggctttcaagggggtactgttacagagatcaacttgtcaactatatttggaaagcgccttactatccaagctgcgggcttgcgggttcgctctgcagagaacaaagaacaaatcatctctgatgttcacaagcatgtttggcctgcatttgaagaaggaaaagtgaagcccatcatccacacatcacttcccttgtcacaagctgcagaggcccacaagattatggaatccagcacacatatcggcaaaatcctgcttatagtttag

SEQ ID NO: 592 - protein, 325 aa, Picea sitchensis
MKAVVITTPGDADVLQIQDVDDPQVKDDEVLIKISATALNRADTLQRRGSYPPPKGAPPYLGLECSGIIEAVGKNVQTWKVGDEVCALLGGGGYAEKVAVLSGHVLPVPKGISLQEAAALPEVACTVWSTVFMTSHLSKGENFLVHGGSSGIGTFAIQIAKYYGARVFVTAGSEEKLARCKELGADVAINYKTEDFVARVKEETGGKGVDVILDSMGASYLQRNLDALGLDGRLFLIGFQGGTVTEINLSTIFGKRLTIQAAGLRVRSAENKEQIISDVHKHVWPAFEEGKVKPIIHTSLPLSQAAEAHKIMESSTHIGKILLIV

SEQ ID NO: 593 - DNA, 942 bp, Picea sitchensis
atggattatatgcagaaggcttggttttacaacgaatatggacccagagcggtactgcagtatggtgacttccctgtgccccaactgggagatactcaggtccttgtaagagtccgtgctgctgcactcaatcctgtagacttcaaattgcgcaatggagtgttcaaggacactggcttggaattccctgtggtgccaggttgtgatgtggcaggagtaatagttgatgaaggagataatgtctcaatgtttagcaagggcgatgaagtgtatggcaatatccaaagcttcaacactgtcgggccaaaacaatatgggactttaacacaatacacagcagtggaagaaagtctgattgctttgaaacccgaaaacatgtcctttgaagaagcagccagctttcctctggctcttcaaactgcccaagaaggttttgacagagcaaaatttcaaaggggtcagactgtgttcatcgtaggtggagaaggaggtgttggtagcctggctattcagcttgccaagtatgtgtacggagcttcaaaaatagcaactactacaagccctgggaaggtggattttgtgaaaaaattaggacctgatatggtgattgattataccaagaaaagttatgatcaaatactagaaaaatttgactttgtttttgacactattggagattctcacagatcttatgtggttgcaaaagaggaaggtaaaattattgatattgccaattcctcgcctcatccaagggcagaattttacattgtgactccaagtgggagcaacttggagaggcttaggagctacattgagtgtgagaaattgaagccagtgattgatcccaccggcccatatgcattttcaaatgttatggaggccttcaagcatcttgaaagtggaagagcgagagggaaggttgtcatttcacccattgattga

SEQ ID NO: 594 - protein, 313 aa, Picea sitchensis
MDYMQKAWFYNEYGPRAVLQYGDFPVPQLGDTQVLVRVRAAALNPVDFKLRNGVFKDTGLEFPVVPGCDVAGVIVDEGDNVSMFSKGDEVYGNIQSFNTVGPKQYGTLTQYTAVEESLIALKPENMSFEEAASFPLALQTAQEGFDRAKFQRGQTVFIVGGEGGVGSLAIQLAKYVYGASKIATTTSPGKVDFVKKLGPDMVIDYTKKSYDQILEKFDFVFDTIGDSHRSYVVAKEEGKIIDIANSSPHPRAEFYIVTPSGSNLERLRSYIECEKLKPVIDPTGPYAFSNVMEAFKHLESGRARGKVVISPID

SEQ ID NO: 595 - DNA, 1080 bp, Pinus taeda
atggattctcctcagacgggcacaatgcaagcgttaatctgcagaaaattaggagatcctactgctcccatgtcagaaacctcccccatattcgtctcgtcttatcaccctattcctcaattgaattcacccacctcggttcggatcagaatcaaggccattagcataaactatggaactcctttgcaggtcatgggcaagtaccaggagaagcctcctcttccctttgtcctgggctctgatttctccggggtcgtggaagctgtggggaagggagttaccagggttaaagttggggacagagtctgtgcaatgacagggcaggatagttatgcagagaaaattgttttggacgagaaacagctgtttgtagttcctccaggatgtgatttgattgctgctggtggacttccagtagcttttggtacttcacatctcgggcttgttcaccgagcaggaatttctcgcggtcaggttttgcttgtccttggagcagcaggtggtgtagggttgtcagctgtgcagataggaaagatttgcggggcaattgtaattgctgtagcaaggggacctgaaaaagaacgtcttctcaaatcattaggagctgaccatgtggtcgactctacaagcagcaatataatacctaatgtcagggagtacttgaagtcaagaaaccttaagggagtcgatattctctatgatcctgtagggggaaagctcttgaaagacagtttgaagcttttaaactggggagctaagattttgatcataggatttgcaagtggagagattcctatcatccctgcaaatattaccctcgtaaagaactggacggtacatggactctattggggaagctacaaacttcatcaaccggatgttttggtagattccatgcaagagcttctatcatggttagcaaaaggcttgatacatattaacgtgtctcatacattcaggctgtcagaggcaaaccttgcatttgcggcaattatgcaaagaaacgttattggaaaggtcatgatcacctttgaagataatacattcgttgatgaaaaagcagccagatcaaaactttga

SEQ ID NO: 596 - protein, 359 aa, Pinus taeda
MDSPQTGTMQALICRKLGDPTAPMSETSPIFVSSYHPIPQLNSPTSVRIRIKAISINYGTPLQVMGKYQEKPPLPFVLGSDFSGVVEAVGKGVTRVKVGDRVCAMTGQDSYAEKIVLDEKQLFVVPPGCDLIAAGGLPVAFGTSHLGLVHRAGISRGQVLLVLGAAGGVGLSAVQIGKICGAIVIAVARGPEKERLLKSLGADHVVDSTSSNIIPNVREYLKSRNLKGVDILYDPVGGKLLKDSLKLLNWGAKILIIGFASGEIPIIPANITLVKNWTVHGLYWGSYKLHQPDVLVDSMQELLSWLAKGLIHINVSHTFRLSEANLAFAAIMQRNVIGKVMITFEDNTFVDEKAARSKL

SEQ ID NO: 597 - DNA, 1050 bp, Pinus taeda
atggctataaatacacaccccactatccccagtttcgtccgcaccagtctccgaatttccgattcatcagatcagaacgtaacaaactgttccaggttgcagaaagattcgagcaaaatgcagaaggcgtggttctacaaagaatatggatccatagacgttttggagttcggggaattccctgtgccaaagccgggtccaggccagattttagttaaagtcaaagctgccgcgctcaatcctgtcgacttcaaaaaacgagaaggcttattcaagagcgacgattgcgactttccggctgtgccgggttgtgatgcagcaggagtggtggtggaagttggcgatggcgtttccaagttcaagaatggtgatgaggtctacaccgacgttcaggtcttcacagcgggaaagccaaagcaactggggacactcgcccagtacaccctagtggaggaacacctggtggctcctaagcccactaatttatcgttcgaggaagctgcgggtctgccgcttgctgtactgactgcccagcaggcgttcgatatagcgaaatttgagaaagggcagagcgtgttcatcgtgggaggagcgggtggagtgggtagcctcgctattcagcttgcgaagcatgtgtatggagcttcaaggattgtttccacggctagcactgggaagcttgacttcgtcaaaagcctgggggcagatgtggtcatcgattatacgaagcagagctacgatcagatctccgagaaattcgatttcgtattcgacaccgtaggggagtcaagcaagtcccatgttgtggccaaagaggaagccaaagttctggacatagcttcatttcaaccaattcccagagttgaatttttcttggtaacacctagtgcccataacctggagaagctgcagccgtacatagaaagtgagaaattgaaaccagtgatcgatccaaagagccctttttcgttctctgatgttatagaggctttcaaacatcaggagagcggacgagccaaaggaaagattgtcatttcgcccatcgattaa

SEQ ID NO: 598 - protein, 349 aa, Pinus taeda
MAINTHPTIPSFVRTSLRISDSSDQNVTNCSRLQKDSSKMQKAWFYKEYGSIDVLEFGEFPVPKPGPGQILVKVKAAALNPVDFKKREGLFKSDDCDFPAVPGCDAAGVVVEVGDGVSKFKNGDEVYTDVQVFTAGKPKQLGTLAQYTLVEEHLVAPKPTNLSFEEAAGLPLAVLTAQQAFDIAKFEKGQSVFIVGGAGGVGSLAIQLAKHVYGASRIVSTASTGKLDFVKSLGADVVIDYTKQSYDQISEKFDFVFDTVGESSKSHVVAKEEAKVLDIASFQPIPRVEFFLVTPSAHNLEKLQPYIESEKLKPVIDPKSPFSFSDVIEAFKHQESGRAKGKIVISPID

SEQ ID NO: 599 - DNA, 942 bp, Pinus taeda
atgagtgaactccagaaggcgtggttctacaacgaatatggatccgtggatgtgttgcaattcggtgaagtccctgtgccaaagccgaggccgagccaggttctaattaaaatccgagcggctgctctcaatcccgtcgactttaagaggcggcacggcttattcagaagggcagattctgactttccgactgtgccgggctgtgatgcggcaggagtggtggtcgaagtgggcgatggtgttaccaagttcaagaatggcgatgaggtctacagcgacatccaggatttcggagcgggcaggcccaaacagtggggaaccctcgcccagtataccgcggtggaggaatacctggtggcgccgaagcccaaaaatttatcgttcgaggaagcggcgagcctgccgcttgcgctcctgactgcgcagcaggcgttcgatatagccaaatttgaggaggggaagagtgtgttcattgtcggaggagcgggcggagtgggcagtctggccattcagctggcgaggcatgtctatggagcttccaggatcgtttccacgtctagcactgtgaagctcgagttcgtgaaaagcctgggggcggatgtggtcatcgattatacgaagcagagctacgatcagatctccgagaaattcgatttcgtttttgacaccataggggattcagcaaagtctcaggtggtggccaaagaggaagccaaagttctggacatagcttcgtttcagcctcatggcagggttgaattttttggggtttcgccccacgcccaaaacctggagaagctgcagccttacatagagagtgagaagctgaagcccgtgatcgatcccaagagcccgtactcttttactgacgtgaaagaggctttcaagcatcaggaaagtggacgagccagaggaaagatcgtgatttcgcccatcgaataa

SEQ ID NO: 600 - protein, 313 aa, Pinus taeda
MSELQKAWFYNEYGSVDVLQFGEVPVPKPRPSQVLIKIRAAALNPVDFKRRHGLFRRADSDFPTVPGCDAAGVVVEVGDGVTKFKNGDEVYSDIQDFGAGRPKQWGTLAQYTAVEEYLVAPKPKNLSFEEAASLPLALLTAQQAFDIAKFEEGKSVFIVGGAGGVGSLAIQLARHVYGASRIVSTSSTVKLEFVKSLGADVVIDYTKQSYDQISEKFDFVFDTIGDSAKSQVVAKEEAKVLDIASFQPHGRVEFFGVSPHAQNLEKLQPYIESEKLKPVIDPKSPYSFTDVKEAFKHQESGRARGKIVISPIE

SEQ ID NO: 601 - DNA, 942 bp, Pinus taeda
atgaataataaagtgcagaaagcgtggatgttcaatgaatacggatccatagacgtcctgtacttgggggatttccctgtgccaaagcctgggttaggccagcttttagttgaagtccgggccgctgctctcaatcctgccgactttaagtggcgggatggcttaggaaacgtgcattccaaatttccggctgtgccgggctgtgatatgtcgggagtggtggtggaaattggtgatggcgtctccaagttcaaggccggtgacgagatatacagcagtatccagagtttcgcaggaggcaagctacagcagtgcggtactctcgctcagtacacagtagtggaggaatgcctagtggcgccgaagcccaataatttatcgtttgaggaagcagcgagcctgccgatggcgcttcagactgcgcagcatggcttcgatacaaccaattttgaaaaggggcagagcgtgttcattgtgggaggagcgggcggagtgggcagcctcgccattcagctggcaaagaatgtgtatggagcttccaggatcgtttctagcgctagcacagggaagctcgagttcgtgaaaagcctaggggcagatctggtcatcgattacaccaagcagagctacgatcaggtttccgagaaatttgattttgtattcgataccataggggattccttcaaatctcatgtgttggccaaagaggaaggcaaggttgtggacatagcgttgttcgagcctcatcctagagctcagttttgcatagtgtcagtcagcgcacataacctggagaagttgcaaccctatatagagattgagaagctgaaaccagtgattgatccgaagagcccgtactcattctcagacgttatagaggctttcaaacatcaagaaagcggacgagcccgagggaagattgttatttcccccatccagtga

SEQ ID NO: 602 - protein, 313 aa, Pinus taeda
MNNKVQKAWMFNEYGSIDVLYLGDFPVPKPGLGQLLVEVRAAALNPADFKWRDGLGNVHSKFPAVPGCDMSGVVVEIGDGVSKFKAGDEIYSSIQSFAGGKLQQCGTLAQYTVVEECLVAPKPNNLSFEEAASLPMALQTAQHGFDTTNFEKGQSVFIVGGAGGVGSLAIQLAKNVYGASRIVSSASTGKLEFVKSLGADLVIDYTKQSYDQVSEKFDFVFDTIGDSFKSHVLAKEEGKVVDIALFEPHPRAQFCIVSVSAHNLEKLQPYIEIEKLKPVIDPKSPYSFSDVIEAFKHQESGRARGKIVISPIQ

SEQ ID NO: 603 - DNA, 978 bp, Populus trichocarpa
atgaaagcagtagtgataactacaccaggtggcccagaagtgctgcaattacaagaagttgaagacccacaaatcaacgaagatgaagtcttgatcaaagtagaagccacagccttgaacagggcagatactctccaaagacaaggcaagtatccacctcctaaaggagctagcccatatcctggtcttgaatgttcaggcaccattgaagctgtcggaaaaaatgtctctcgctggaaaattggtgatcaggtttgtgctcttcttagtggaggagggtatgcagagaaagtggctgttccagcaggacaagtacttcctgttccacaaggtgtttcgcttaaggatgctgctgctttgcctgaagttgcatgcactgtttggtctactgttttcatgatgagtcggctgtctgcaggggaaacgttcctggttcacgggggctcgagtggaattggtacatttgcaattcagatagctaaacatcaaggggttaaggtgttcgtgacggcagggagtgaggaaaaactagctgtttgtaaggatcttggagctgatgtatgcatcaattacaagactgaggactttgtggcacgagtgaaggaagaaacgggtgggaaaggtgttgatgttattctggatagtgttggagcaccctattttcagaaaaacgtagacagcttaaatattgatgggaggctttttctccttggcttcatgggtggagctgtgacacaagtaaatctggcttctttgtttgcaaagcgcatcacagtgcaagctgctggcttgcgaactagaactctggaaaacaaagcagaaattgttagtgaggtggaaaagaatgtttggcctgcaattgttgcaggcaaggtgaagcctgtggtgtacaagtatcttccattatctgaggcagcagagggtcaccggctcatggaaagtagccagcatattggtaagatactgcttgtggcatga

SEQ ID NO: 604 - protein, 325 aa, Populus trichocarpa
MKAVVITTPGGPEVLQLQEVEDPQINEDEVLIKVEATALNRADTLQRQGKYPPPKGASPYPGLECSGTIEAVGKNVSRWKIGDQVCALLSGGGYAEKVAVPAGQVLPVPQGVSLKDAAALPEVACTVWSTVFMMSRLSAGETFLVHGGSSGIGTFAIQIAKHQGVKVFVTAGSEEKLAVCKDLGADVCINYKTEDFVARVKEETGGKGVDVILDSVGAPYFQKNVDSLNIDGRLFLLGFMGGAVTQVNLASLFAKRITVQAAGLRTRTLENKAEIVSEVEKNVWPAIVAGKVKPVVYKYLPLSEAAEGHRLMESSQHIGKILLVA

SEQ ID NO: 605 - DNA, 1059 bp, Populus trichocarpa
atggaggctttggtttgcaagaaactaggtgatccaacagcattgaaatcatcaatatcagaggcagataatgattccccaataattctaagcaaaacccatcctatcccacaacttaaatcacccacatcagttagagttagagttaaagctacaagcttgaactatgcaaattacctgcaaattttaggcaagtatcaagagaaacctcctcttcctttcattcctggctctgattattctgggatcgttgatgctgtgggttctggtgtctcacttttaaaggtcggtgaccgtgtttgttcctttgctgcgcttggttcctttgctgaattcattgttgctgaccaggctgaattgtttaaagtgccagatgggtgtgatttggttgctgctggtgcattacctgtggcttttggcacctcgcatgttgcacttgttcatcgagctcaattgacttctggtcaggtgttgttggttcttggtgcagctggaggggttggtctttctgctgttcaaattggcaaggtttgcggggctgttgttattgcagttgcaaggggagatgaaaaggtgcagtttttgaagtcattgggagtggaccatgtagtggactcgagcaaagagagtgtcattgcaagtgtcaaggacttccttaaagcaaggaagctcaaaggggttgatgttttgtatgatcctgttggaggcaaacttactaaagaaagcatgaagttgttgaattggggtgctcagattttggttattggttttgctagtggggatgtacctgtcatccctgcaaatattgctcttgtcaagaactggactgtgcatggactttattggggcagctataaaatacatcgacctgttgtgctcgaagattcaatccgggagctgctttcctgggtggcaaagggccggattaccatccacatttctcatacttacaatttatcagaggccagtctcgcgtttgctgctattaaagataggaaggcaattgggaaggtgatgattactattgatgatgaaagaagtgtaaaatctaagctttaa

SEQ ID NO: 606 - protein, 352 aa, Populus trichocarpa
MEALVCKKLGDPTALKSSISEADNDSPIILSKTHPIPQLKSPTSVRVRVKATSLNYANYLQILGKYQEKPPLPFIPGSDYSGIVDAVGSGVSLLKVGDRVCSFAALGSFAEFIVADQAELFKVPDGCDLVAAGALPVAFGTSHVALVHRAQLTSGQVLLVLGAAGGVGLSAVQIGKVCGAVVIAVARGDEKVQFLKSLGVDHVVDSSKESVIASVKDFLKARKLKGVDVLYDPVGGKLTKESMKLLNWGAQILVIGFASGDVPVIPANIALVKNWTVHGLYWGSYKIHRPVVLEDSIRELLSWVAKGRITIHISHTYNLSEASLAFAAIKDRKAIGKVMITIDDERSVKSKL

SEQ ID NO: 607 - DNA, 1092 bp, Phaeodactylum tricornutum
atgttcgtagcctttcaaactatttcccgcaactcgtcactgaccggtgtgctccgccgaagcatgtcttccatcccatcaaccatgaaggctgccgtcgtccgcgaaacgggtgacgctcacgccctcaaagtggaaacggactttcctaccccatcactcggagctaaccaggtaattgtcaagaacgaatttgctggtattaactttatcgatacctaccatcgcaagggtttgtacgcccgtgatttgcctttcattggcggccaggaaggtggtggtacggtcgcggccgtctcggacgaagccgccgctcagggaatcaacgtcggtgaccgtgtggcctactccgtctttggttcatacgctgaatacacggcggttcccgccgcgaaactgttgcccgtcccggacagtatcggtttggacgtggccacgtcgtgtgtcgtgcagggcctcacggcacactacctcgtcacgtcggcgcacgcggacttgatcaaatccggcgagtggtgcttgattcacggagtcgccggtggaacctgccagtgggctgcgcaaatggcgaaattgcgcggattcaaagtgattggaacggcgcccaagggaaaggcggatattgctagcaacttaggttgcgacgaactgatcctcctcgacgaggttgcgggaacgtcgtatgaagactacgaatccgtggacgttacggccaaagttttggaaatcaccggtggcgcaggtgtcaagtgtgtgattgacggaattggcaaagcaaccatggatatttcgatcaactcgttggcccgacggggtattttcgtgtcgtttgggaacgcctccggtgccgtcccggcgtttcccgtcttgcgcttgattggcaagtcagcctatgtgacgcgtccgaaattactagactacactgtcgatcgcgaagaattggtgtggcgggctggcgaagttttcgactggttgcaagcaggcaaactcaaggtcgccgtggacacgaccttttccttggacgacgctgcggaaggacacatgtatttggaagcgggcaagagcaaaggaaaggtactttacaagatttaa

SEQ ID NO: 608 - protein, 363 aa, Phaeodactylum tricornutum
MFVAFQTISRNSSLTGVLRRSMSSIPSTMKAAVVRETGDAHALKVETDFPTPSLGANQVIVKNEFAGINFIDTYHRKGLYARDLPFIGGQEGGGTVAAVSDEAAAQGINVGDRVAYSVFGSYAEYTAVPAAKLLPVPDSIGLDVATSCVVQGLTAHYLVTSAHADLIKSGEWCLIHGVAGGTCQWAAQMAKLRGFKVIGTAPKGKADIASNLGCDELILLDEVAGTSYEDYESVDVTAKVLEITGGAGVKCVIDGIGKATMDISINSLARRGIFVSFGNASGAVPAFPVLRLIGKSAYVTRPKLLDYTVDREELVWRAGEVFDWLQAGKLKVAVDTTFSLDDAAEGHMYLEAGKSKGKVLYKI

SEQ ID NO: 609 - DNA, 1215 bp, Phaeodactylum tricornutum
atgcgcacttttgtgaacgttttgacagtcagtgcagtagtacatgtaaagaaagtggcatatttcggatttcctgtattaccattgggtcagtttatcggagtcgtgtttttaagacggagaacttccacagtgttccgtgtgttccgggactttcctagaggagcgcacgacagcaacaaatcttcctcgtttagcacggaaaacagggatatcgacccgtcgcataaaaagcaaatagattgcatcatgaaggctatgcagctcatgtaccacacggcccaagccaaggccattgatgtcgaaaaaccaggcgccttaggaccacaggaagtgcttgtgaaggtccagtactcggcaatcgacactggcgtcgaagctctcgtccaaaaaacgattacgggtatgttcatccatgcacgtaccgacccactaattcttggttggcatttttccggagtaattgccgagataggtgaccaggtttctagtttgaaacttcaagatcacgtatggggatttctacagtaccagccaagccagaagcagggatcctttgccgagtacatcaaagtgagcgctgacgaatgtgctgtccgaccccggggagtgggggcagacattgcggccgccgcatcgacggagtcgttgacggctttgcaagccatgaaaaatctatgcgggcttcagaaagatggttccgtgttgattttgggagcgggaggcggggttggttcggcggcagtgcaaattgccaaaattctcggtgcccacgtgacggcagtggtgggtaccaaagatgtggagcgcgtcaaagcattaggagcagatgttgtgttggatcgatccaaagacgatccgctgggtggggatgcgatgtacgatgtgattttcgatactccatccaaatactgggcaccaacatgtatgaaaaaactgagtggcaacggaacttatgtcaccacactaccaagcctgggcctttatgttggtatgttcctgtctttttttaacgctaaaggatccaaatttgtcgaatgcaaatctaccaccgaggatttgaaactagtgggatcttggttggacgaaggcaaactcaagatcgacattgacagcacgcacccgattcgaaaccttgaagccgcggttacccggcaaagtgacccttcgaaaattggacgcattgtcatacaagttgatggtggttgggaatag

SEQ ID NO: 610 - protein, 404 aa, Phaeodactylum tricornutum
MRTFVNVLTVSAVVHVKKVAYFGFPVLPLGQFIGVVFLRRRTSTVFRVFRDFPRGAHDSNKSSSFSTENRDIDPSHKKQIDCIMKAMQLMYHTAQAKAIDVEKPGALGPQEVLVKVQYSAIDTGVEALVQKTITGMFIHARTDPLILGWHFSGVIAEIGDQVSSLKLQDHVWGFLQYQPSQKQGSFAEYIKVSADECAVRPRGVGADIAAAASTESLTALQAMKNLCGLQKDGSVLILGAGGGVGSAAVQIAKILGAHVTAVVGTKDVERVKALGADVVLDRSKDDPLGGDAMYDVIFDTPSKYWAPTCMKKLSGNGTYVTTLPSLGLYVGMFLSFFNAKGSKFVECKSTTEDLKLVGSWLDEGKLKIDIDSTHPIRNLEAAVTRQSDPSKIGRIVIQVDGGWE

SEQ ID NO: 611 - DNA, 1191 bp, Phaeodactylum tricornutum
atgacggccaaaacattcgctctagtggtgatctgtctcgcctgggctctccaccgctacgttcgcattcctcgctcgctggaatggcgtccgtcgcccccgagcgactcggccacgatgaaggccgtgctctacaccgaacacggcgacacttctgtcttgcgagtacatcaagacgcaccgcagccgcaactccaaccccaccagatactcgtgcacgtctacgcctcctccataaacccctgtgactacaaaaaccgtcgcaacgaggttccgtcatgggttgtcccgaaacccaagatccccggcgcggacgtggccggtgtggtggtggccgtgggttccggagtcgacgtcgaacgcgtgcgtccgttccgagtcggagaccgcgtcgctgccatgttgccgctccttcattcccgctggggggcggccgcatcgtacgtcgccgtcgacgccaatctcgtggcccacgtcggacccagagtatccttacgggatgccgcggctctacccttggtcgcactcaccacactgcaagccctggaatccgtcactgtctcgcaatcaccgacggaggccccacgaaaacgcactattctcgtccaagccggagcgggtggggtcggatcgttcgcgatccagtatgccaaacacgttttgcaaatgcgcgtgattgccacagcgtcatcggaaaaggccgaatttctccgtagtatcggctgtgatcaggtggtggactaccggaacgagccgtttgaagaggtggtacacaacgtcgatgtggtgctggatcccgtcagttggttgtacgaagaccgaactttggcgagcgaggtgctccgacccggtggccattatttaaacattgtaggctcggactgggccttttctggaacggaacaaggcaacgggccacgatcactttggaactggatcaaagcgaaaacctttggaccgttcaaatacagcttcgtggtggtggaaccgaacggtatacagctgcaagccgtcatggacttgctcgaaagcgccaccattcgggccgttgtggaccgaacctttgctctagacgatgttcgagaagcgtacgagtatctcgagaaaggccacgccactggaaaggtggttctcgtgcacgaaaaggaagaagtggaatccggttctgcgactgttgcagaagaaagttaa

SEQ ID NO: 612 - protein, 396 aa, Phaeodactylum tricornutum
MTAKTFALVVICLAWALHRYVRIPRSLEWRPSPPSDSATMKAVLYTEHGDTSVLRVHQDAPQPQLQPHQILVHVYASSINPCDYKNRRNEVPSWVVPKPKIPGADVAGVVVAVGSGVDVERVRPFRVGDRVAAMLPLLHSRWGAAASYVAVDANLVAHVGPRVSLRDAAALPLVALTTLQALESVTVSQSPTEAPRKRTILVQAGAGGVGSFAIQYAKHVLQMRVIATASSEKAEFLRSIGCDQVVDYRNEPFEEVVHNVDVVLDPVSWLYEDRTLASEVLRPGGHYLNIVGSDWAFSGTEQGNGPRSLWNWIKAKTFGPFKYSFVVVEPNGIQLQAVMDLLESATIRAVVDRTFALDDVREAYEYLEKGHATGKVVLVHEKEEVESGSATVAEES

SEQ ID NO: 613 - DNA, 1266 bp, Phaeodactylum tricornutum
atgggagcggcatcgtcgtttctgtgcacccaggccgacgccattccgggtcagctcattgccggtacattgcctgccgtccgccactgcatcgtgtacggcaaggaggacggcacattgcgcgaagaaacgcaacagctacccacagttaccgaccaatcggatcacgtctgggtgcgtgtccacgccgttggacttaatccggttgacgctaagaacgtcgtcggcgacaagtttcctcaccactggcgcattgtgcgttcctgggtccgttccgccttggtcgccggcaccattcctggatttgattacgctggtaccgttgcggccctaccgaagcacggacgggccctcaagtgtaacgctgacgatctgccggctttgaaggttggggacgctgtcttcgggaccatgccagctttgcaaggtaccttggcaacctatattgccgctccccggcaccaaatgtggcataaaccagagagcctttcctttgtccaagcagccgccttgcccttggtcggactgacggcctaccaatgcttgcagccacacatggcttttcgcaatgagaaggatggtgcttccaatgcgtccgcatcttcggtgcttgttgttggtggaagtggcggtaccggtcacgtggcgattcaagtagcccgcaatctcggggcccgttgcgtgacagcggtttgttccacgcggaatgtggcattttgtcaccaacagggtgccacctatgtggtcgactacaccgccaatggcggagacaaagatacgttgcggcggcatttgctcgagaccggtcccgcttgtccgttcgatatcgtgctggattgcgtctcgtccgctgatccccgtgatcaacaaaccttttcgtaccgccaactgctgcaacaagatgtccatattcagaagcttttgaacgaagccgctgtgtatcgtcgtttgggtggaccgtccctcgattggctccgggccgggatggaacagaagcttggttggacgggtgtctggaagtacacaaccaccaaacggaattccaacgacgaccgcttgttttggattcggtttccccatacgtcgttacagttgcaagcattgtctatcatggccaatcagggccagctactgcccaaagtggaaaaagtgtacagcttctccgccaccgacgttgaaagggcctttgacgatttactgtcccgtcgagttcggggcaagattgtggtggaattggtcaaggagaccgaccagcagaaagactag

SEQ ID NO: 614 - protein, 421 aa, Phaeodactylum tricornutum
MGAASSFLCTQADAIPGQLIAGTLPAVRHCIVYGKEDGTLREETQQLPTVTDQSDHVWVRVHAVGLNPVDAKNVVGDKFPHHWRIVRSWVRSALVAGTIPGFDYAGTVAALPKHGRALKCNADDLPALKVGDAVFGTMPALQGTLATYIAAPRHQMWHKPESLSFVQAAALPLVGLTAYQCLQPHMAFRNEKDGASNASASSVLVVGGSGGTGHVAIQVARNLGARCVTAVCSTRNVAFCHQQGATYVVDYTANGGDKDTLRRHLLETGPACPFDIVLDCVSSADPRDQQTFSYRQLLQQDVHIQKLLNEAAVYRRLGGPSLDWLRAGMEQKLGWTGVWKYTTTKRNSNDDRLFWIRFPHTSLQLQALSIMANQGQLLPKVEKVYSFSATDVERAFDDLLSRRVRGKIVVELVKETDQQKD

SEQ ID NO: 615 - DNA, 1179 bp, Poncirus trifoliata
atggagaccatactcactactgctgcttctaaactcacaatctttcattctatctcctccaccaaattaaattcattttctcgaaaattttccgtcggtttctcgggaaacaaaaacaggaaaaaagcaaccagccttaagcaaggctcatttttttaccttcctttgagagttcaagcaagtgcatcacaagctgcagcatcatccactgaggctgagcccactaaagtgggaactgttccaagcgaaatgaaggcttggctgtatggggaatatgggggcgttgatgttttgaagttcgacgagaaagtgacagtgcctcaagtgaaggaggatcaagtgttgatcaaagttgtcgctgctgcccttaatcctgttgatgggaagagaaggctgggcaagttcaaggccactgattctcctctcccgactgttccaggctatgatgttgctggtgtagtggtaaaggttggcactcaagtgaaggaatttaaggagggggatgaagtatacggggacataaatgagaaagctttggaagggcccaaacagtttggctctttggcagagtacactgcggttgaagagaggttactggccccaaaacctaagaatttggactttgttcaggctgctggccttccgctcactatcgagacagcctatgagggtctagaaaggactggtttctctgctggtaaatctattcttgttttgaatggttctggtggtgttggaagcttggttattcagctggcgaaacaagtatttggtgcttcaagagttgcagcaacttcgagtaccaggaacttggagttcttgaagagtttgggtgctgatttggctattgattacaccaaagacaactttgaagatttgccagaaaaatttgacgtagtttacgatgctattgggcagtgtgatagagcagtaaaggccatcaaagaagggggcaccgtggtagcactaactggcactgttacacctcctggcttcagatttgttgtcacttcaaacggagaagttttgaagaaactgaatccatatctagagagtggaaaggtgaagcctatcatagaccccaaggggccatttcccttcagccaggttgttgaggctttttcatacattgaaacgaacaaagctactggaaaagttgttatacacccaattccatga

SEQ ID NO: 616 - protein, 392 aa, Poncirus trifoliata
METILTTAASKLTIFHSISSTKLNSFSRKFSVGFSGNKNRKKATSLKQGSFFYLPLRVQASASQAAASSTEAEPTKVGTVPSEMKAWLYGEYGGVDVLKFDEKVTVPQVKEDQVLIKVVAAALNPVDGKRRLGKFKATDSPLPTVPGYDVAGVVVKVGTQVKEFKEGDEVYGDINEKALEGPKQFGSLAEYTAVEERLLAPKPKNLDFVQAAGLPLTIETAYEGLERTGFSAGKSILVLNGSGGVGSLVIQLAKQVFGASRVAATSSTRNLEFLKSLGADLAIDYTKDNFEDLPEKFDVVYDAIGQCDRAVKAIKEGGTVVALTGTVTPPGFRFVVTSNGEVLKKLNPYLESGKVKPIIDPKGPFPFSQVVEAFSYIETNKATGKVVIHPIP

SEQ ID NO: 617 - DNA, 984 bp, Panicum virgatum
atgagggcggtggtgatcacgcgcggcggcgggcctgaggtgctagaggcccaggacgtggaggacccggcgccgctgggggaaggggaggtcctcctccaggtcgccgccgccggcgtcaaccgcgccgacacgctccagcgccacggccgccacccgccgcccgccggcgcgtccccgtaccctgggctcgagtgctccggcaccctcctcgcgctcggtcccaacgtgccctcgcgatggtccgtcggcgacaaggtgtgcgcggtgctaagcggcggcgggtacgcggagaaagtggtggtgccggcggggcagctgctgcccgtgccggagggggtgtcgctaacggacgcagccggcttgcccgaggtggcctgcactgtctggtcgaccgtattcatgatcagccacctctcccccggcgaatcattccttatccatggaggatcaagtggaatcggtactttcgctattcagattgcaaagcacctcggaattaaggtttttgtgactgcaggaagcgaagaaaaactagcagcctgcaaagatttgggtgctgatgtatgcataaactacaaaactgaagacttcgttgaacgtgtcaaacaggaaaccaatggaaagggtgttgatgtcattctggacaatattggaggatcatatctccagcgtaacctgaacagcttaggtgttgatggtagacttttcatcattggcttccaaggaggcgctgtagctgaagtgaacctgcaagctgtttttgcacggcgcttgaccatacaagctgctggactgcgtggtagaagccctgccaataaagctcagatcgtcagcgaggtggaaaagaatgtgtggcctgccgtcacggctggcaaggtgaagccggtgatttaccagacgttcccgttatctgaagcggctgaggcgcatagattgatggaagctagcacgcacatcggcaagatattgctgctcccttga

SEQ ID NO: 618 - protein, 327 aa, Panicum virgatum
MRAVVITRGGGPEVLEAQDVEDPAPLGEGEVLLQVAAAGVNRADTLQRHGRHPPPAGASPYPGLECSGTLLALGPNVPSRWSVGDKVCAVLSGGGYAEKVVVPAGQLLPVPEGVSLTDAAGLPEVACTVWSTVFMISHLSPGESFLIHGGSSGIGTFAIQIAKHLGIKVFVTAGSEEKLAACKDLGADVCINYKTEDFVERVKQETNGKGVDVILDNIGGSYLQRNLNSLGVDGRLFIIGFQGGAVAEVNLQAVFARRLTIQAAGLRGRSPANKAQIVSEVEKNVWPAVTAGKVKPVIYQTFPLSEAAEAHRLMEASTHIGKILLLP

SEQ ID NO: 619 - DNA, 1098 bp, Panicum virgatum
atgtggtggagggcggtgagggaccgccggcggatcgccggggcgcggtcggcatccacggcggcggcggcggcggcggagaagagctgccgtgccgtggtggtgccgcgttacggtggcccggaggtgctggaggtcaggcagggtgtgccggtgcccgatctgaagccgcgggatgtgcttgtgcgcacgcgcgcggtctccatcaaccccctggacctgcgaatgcgatctggttatggacgctccatattcgagcccctcctacctcttatcattggacgggacattagcggtgaagttgcagccacagggacttctgcatcgtcattttctattgggcaagaagtgttcggtgcattgcatccaacagctctcagagggacatatgctgattatgcaattctttcactggatgaacttactcccaaaccatctacactcagtcatgcagaggctagtgcaatcccatttgctgcattgactgcatggcgtgctttgcatggtacggctcgaatttctgaaggacaaagagtacttgtgattggtggaggaggagcggttgggctagctgctgtacagcttgcagtagctgcagggtgtggggtttctgccacctgtggagcccaaagtgttgagcgagttatgggagctggtgctgaacaagctattgattacaccgctgaggatacagaagcaacagtcaaagggaagtttgatgctgttttagacaccattggagtacctgagactgaaagaattggcataaatgttcttaggagaggtggacactatatgactcttcagggagaagcagcggcactagcagatagatatggattagctgtagggcttcctgctgctactgctgctttgctaaagaaacagatgcagtatcgttattctcatggaatagagtattggtggacttacatgagagctgatgctgaagggcttcatgagatacaaagactgtctggagctgggaagttgcagatacctgtggaaaagactttttccatcaaccaagtaagagaagctcatatggccaaggagaaaaagttagttcctggcaaggtggtcctagaattcgactaa

SEQ ID NO: 620 - protein, 365 aa, Panicum virgatum
MWWRAVRDRRRIAGARSASTAAAAAAEKSCRAVVVPRYGGPEVLEVRQGVPVPDLKPRDVLVRTRAVSINPLDLRMRSGYGRSIFEPLLPLIIGRDISGEVAATGTSASSFSIGQEVFGALHPTALRGTYADYAILSLDELTPKPSTLSHAEASAIPFAALTAWRALHGTARISEGQRVLVIGGGGAVGLAAVQLAVAAGCGVSATCGAQSVERVMGAGAEQAIDYTAEDTEATVKGKFDAVLDTIGVPETERIGINVLRRGGHYMTLQGEAAALADRYGLAVGLPAATAALLKKQMQYRYSHGIEYWWTYMRADAEGLHEIQRLSGAGKLQIPVEKTFSINQVREAHMAKEKKLVPGKVVLEFD

SEQ ID NO: 621 - DNA, 966 bp, Phaseolus vulgaris
atggcaactactccaagcattccatcacacataaaagcttgggtttattctgaatatggaaacacagaagacattctcaaatttgaatcaaacatacctataccacagatcaaggaagaccatgtgctcatcaaggttgtggctgcagcccttaatcctatagattataagagggctcttggctttttcaagaacactgactctcccttgcctactgttccggggtatgatgttgctggtgtggtggtgagtgtgggaagtcaagtgagaaagttcaaggttggggatgaggtttatggtgatatcaatgaggatcctctggacaatccaaaaactgttggatctttggcagagtatactgctgttgaagaaaagttattggctcacaaaccttccaatttgagctttgttgaagctgcttcccttcctttagccatcatcactgcttatcaaggactagaaagagttgagttttctgctggccaatctgtacttgttcttggaggtgctggtggagttggatcccttgttattcagctcgccaaacacgtttttggggcatcaaaggttgcagccacagccagtactgggaaactggatttgttgaggaacttgggagcagacttagccattgattatacaaaggagaagtttgaagagctggaagaaaagtttgatgtagtgtacgatacagtagggcggggtgagattgagagagcatcgaaggcagttaaagaaagtgggaaagttgtgacagtagcagcaattggaacttcagctatctttgtaaaacgcatttcagatggtggtgtgttggagaaactacaaccttacttagagagtgggaaggtgaagccaatacttgaccctaagagtccctttttgttttctcagactgtggaggcatttgcacacttgaagactaatagagccattggaaaagtggtcatacaccccattccatga

SEQ ID NO: 622 - protein, 321 aa, Phaseolus vulgaris
MATTPSIPSHIKAWVYSEYGNTEDILKFESNIPIPQIKEDHVLIKVVAAALNPIDYKRALGFFKNTDSPLPTVPGYDVAGVVVSVGSQVRKFKVGDEVYGDINEDPLDNPKTVGSLAEYTAVEEKLLAHKPSNLSFVEAASLPLAIITAYQGLERVEFSAGQSVLVLGGAGGVGSLVIQLAKHVFGASKVAATASTGKLDLLRNLGADLAIDYTKEKFEELEEKFDVVYDTVGRGEIERASKAVKESGKVVTVAAIGTSAIFVKRISDGGVLEKLQPYLESGKVKPILDPKSPFLFSQTVEAFAHLKTNRAIGKVVIHPIP

SEQ ID NO: 623 - DNA, 1176 bp, Phaseolus vulgaris
atgcaaaacatgtctctctgtgcttcaccctccaccacaacttcacacctcacttcccttccttcttcactcccttccacttcaccactttctctcagattttccttcactttccgggaaaacagaaccccagttagatcactcaaagctcccttttcagcaaggcctgcaagagtgttggtgaaggctcaggctactgcacctgcttcttctgaggctgtgaaactcacacctgtgccttctcagatgaaggcatgggtgtatggggaatatgggggtgtggatgttttgaagctggactccaatgttgctgtgcctgatgtgaaagaggatcaggtccttgtcaaagttgctgctgctgctcttaaccctgttgatggcaagagaaggcagggaaagtttaaggccactgattctcctcttccgactgttccgggctatgatgttgcgggtgtggtggtgaaggttggtagtgaagtgaaggactttaaagtgggtgatgaagtttatggagatctaagtgagaaagcattagaagggcctaagcaattcgggtctttggctgagtatacagctgttgaggagaaactattggcactaaaacctaagaatttggactttgctcaggctgctgctcttcctctagcaattgagactgctcatgagggtttggagaggactgcattttctcctggtaaatctattcttgttctaaatggttctggaggagttggaagcctagtcattcagctagctaagcaagtctttggagcttcaagagttgctgccacttcaagcactagaaatttggacctgttgaaaagtctgggagctgatttggctattgactacacaaaagaaaactttgaagatttgtcagaaaaatttgatgtagtctttgatgccattgggcaatgtgacagggcagtgaaggctgtgaaagaaggtggcagtgtggtggcactcacaggtgcggttaccccacctggtttcagatttgtagttacttccaatggagctgttcttaggaaactaaacccttacttagagagtggaaaggtgaaaccaattgtagaccccaaaggtccatttccctttgaccagcttgctgaagccttctcctaccttgaaaccaatcgagccactggaaaggttgttatacaccccatcccctga

SEQ ID NO: 624 - protein, 391 aa, Phaseolus vulgaris
MQNMSLCASPSTTTSHLTSLPSSLPSTSPLSLRFSFTFRENRTPVRSLKAPFSARPARVLVKAQATAPASSEAVKLTPVPSQMKAWVYGEYGGVDVLKLDSNVAVPDVKEDQVLVKVAAAALNPVDGKRRQGKFKATDSPLPTVPGYDVAGVVVKVGSEVKDFKVGDEVYGDLSEKALEGPKQFGSLAEYTAVEEKLLALKPKNLDFAQAAALPLAIETAHEGLERTAFSPGKSILVLNGSGGVGSLVIQLAKQVFGASRVAATSSTRNLDLLKSLGADLAIDYTKENFEDLSEKFDVVFDAIGQCDRAVKAVKEGGSVVALTGAVTPPGFRFVVTSNGAVLRKLNPYLESGKVKPIVDPKGPFPFDQLAEAFSYLETNRATGKVVIHPIP

SEQ ID NO: 625 - DNA, 960 bp, Phaseolus vulgaris
atggctgcaacatcactgccttctcacatgaaagcttggacttactcggagtatggcaaatccagcgaagttctcaagtttaaccacagcgtgcctttacctcaggtgaaggaagatcaggtcctcatcaaggtcgctgctgcttccattaaccccattgattataagagaatggaaggttatttcaagaactccgattcccctttaccgactactccggggttcgatgttgctggagtggtggtgaaactgggaagtaaagtaaagaaattcaaggttggggatgaagtttacggtgatatcaatttgaaagctttggaatatccgaaggtgagtggttctttggctgagtacactactgcagaagagatactattggctcacaagccacagaatctgagctttgctgaggctgctagccttcctttaacacttgagacagcttatgaaggccttgaacgaactgggttttctgctgggaaatctatccttgtgcttggaggtgctggtggggttggaacccatgttattcagcttgccaagcatgtatatggagcatccaaggtaggagcaacaggtagcactaggaaactggagttattgaggaatttgggggctgacttgccaattgattatactaaagagaattttgaagacctgcctgaaaagtttgatgtggtgtatgatacagtagggcaaactgaacaggccttcaaggctttgaaagaaggaggcaaagttgtgaccatagtaccacctggatttcctccagctatattgttcattctaagtactgatggggctattttagagaaactgaacccctattttgagagtggtaagttgaagccagtacttgatcccaagagcccgtttccattttctcaggctgttgaagcattttcccatctggaaacaaacagggcaactggaaaagttgttgtctatcccattccttga

SEQ ID NO: 626 - protein, 319 aa, Phaseolus vulgaris
MAATSLPSHMKAWTYSEYGKSSEVLKFNHSVPLPQVKEDQVLIKVAAASINPIDYKRMEGYFKNSDSPLPTTPGFDVAGVVVKLGSKVKKFKVGDEVYGDINLKALEYPKVSGSLAEYTTAEEILLAHKPQNLSFAEAASLPLTLETAYEGLERTGFSAGKSILVLGGAGGVGTHVIQLAKHVYGASKVGATGSTRKLELLRNLGADLPIDYTKENFEDLPEKFDVVYDTVGQTEQAFKALKEGGKVVTIVPPGFPPAILFILSTDGAILEKLNPYFESGKLKPVLDPKSPFPFSQAVEAFSHLETNRATGKVVVYPIP

SEQ ID NO: 627 - DNA, 978 bp, Ricinus communis
atgaaagcagtagtaataactacacttggaggaccagaggttctccaattgcaagaagtagaagacccacaaatcaaagatgatgaggtcctgatcaaggtacatgccactgccgttaaccgcgccgataccctccaaaggttaggcaagcacccgcctcctaagggcgccagtccctatcctggtcttgaatgttccggcaccattgaagccgttgggaaacttgtttctcgctggaaagtaggagatgaggtgtgtgctcttcttagcggaggaggctatgcagagaaagtggcagttccagcaggccaagttcttcctgttcctcctggtatttccctaaaggatgctactgctttccccgaggttgcttgtactgtttggtccactgtttttatgatgagtaggctgtctgcaggcgaaacatttctgattcacgggggttctagtgggattggcacttttgcaattcagatggctaaatatcaaggtgttagagtgtttatcactgcagggagtcaggaaaaattagctgcttgtaaggaacttggtgctgatgtctgcatcaattacagaacagaagactttgttgcacgggtgaaggaagaaactaatgggaaaggtgttgatgttattttggattgcatgggcgcatcctacctgcagagaaacctggacagcttaaatgttggtggaaggctttttatcattggcttcatgggcggagctgtggcagaattaaatctggcctcattgttagcgaagcgcctcacattgcaagcggctggcttgagaggtagaagttcagaaaacaaagcagacattgtaaatgaggtggagaagaatgtttggcctgcaattattgaaggcaaaatgaagcctgtggtttatacatcttttccattatctgaagcggcagaggctcatcgactcctggaaagtagtcagcacatcggcaagatcctgcttcttgcatga

SEQ ID NO: 628 - protein, 325 aa, Ricinus communis
MKAVVITTLGGPEVLQLQEVEDPQIKDDEVLIKVHATAVNRADTLQRLGKHPPPKGASPYPGLECSGTIEAVGKLVSRWKVGDEVCALLSGGGYAEKVAVPAGQVLPVPPGISLKDATAFPEVACTVWSTVFMMSRLSAGETFLIHGGSSGIGTFAIQMAKYQGVRVFITAGSQEKLAACKELGADVCINYRTEDFVARVKEETNGKGVDVILDCMGASYLQRNLDSLNVGGRLFIIGFMGGAVAELNLASLLAKRLTLQAAGLRGRSSENKADIVNEVEKNVWPAIIEGKMKPVVYTSFPLSEAAEAHRLLESSQHIGKILLLA

SEQ ID NO: 629 - DNA, 1098 bp, Ricinus communis
atgcaattcttgagagctcacagccttaaaaccagctctgaataccaaatcttgaagttaggctctgtcaggttcttggtcacctcttgcagggcggtggttctgccccggttcggtgggcccgaggtgctggagctccggtcagatgtagaagtcccccagatcaaacccaatgaagtattggttcgaactcgcgctgtctctgtcaacccccttgacactagaatgcgatcaggttatggccgttcaatatttgaacctcttctacctctcattttgggtcgtgatataagtggcgaagttacagctattggaacttcagttcagtcactgagtgtggggcaagaagtcttcggtgcattacatcctactgccgtgagaggtacttatacagactatgcaattctctcagaagatgagcttactgcaaaaccagcatcagtttcacacgtggaagcaagtgctatcccttttgctgcactaactgcatggcgggctctaaaaagcactgctaggataaatgaggggcaaagagtgttgatagtgggtggtggtggagcagtaggttttgcagcaattcagcttgcagtagctgcaggatgccatgttacagctacttgtggaagtctgagcatagatcgggtactgaaagctggtgctgagcgggctattgactacattgctgaggacattgaacttgcaataaaagggaagtttgatgctgttttggacactattggtgtaccagaaacagaaagaattggcatcaacttcttgaagagaggtggacagtacatgactcttcagggtgaggcagcatctgtgactgataggtacggaatagcagttggacttcctattgctacagctattttattgaagaaacagattcaataccgatattctcatggaatagaatattggtggacttacatgagagctgattcagatgggttggatgaaatccgccgcttatctgaggctggaaagttgaaggtacctgttgaaaaaacattcccgttcacacaagttagggaggctcatgaggcaaaagagaaaaggctaattcctggtaaagtggtgctggaacttgattga

SEQ ID NO: 630 - protein, 365 aa, Ricinus communis
MQFLRAHSLKTSSEYQILKLGSVRFLVTSCRAVVLPRFGGPEVLELRSDVEVPQIKPNEVLVRTRAVSVNPLDTRMRSGYGRSIFEPLLPLILGRDISGEVTAIGTSVQSLSVGQEVFGALHPTAVRGTYTDYAILSEDELTAKPASVSHVEASAIPFAALTAWRALKSTARINEGQRVLIVGGGGAVGFAAIQLAVAAGCHVTATCGSLSIDRVLKAGAERAIDYIAEDIELAIKGKFDAVLDTIGVPETERIGINFLKRGGQYMTLQGEAASVTDRYGIAVGLPIATAILLKKQIQYRYSHGIEYWWTYMRADSDGLDEIRRLSEAGKLKVPVEKTFPFTQVREAHEAKEKRLIPGKVVLELD

SEQ ID NO: 631 - DNA, 1095 bp, Sorghum bicolor
atgtggtggagggcggtgagggcccgccggcgggtcgccggggcgcggcccgcgtccaccgcggcggcgggggcggagaagagctgccgcgccgtggtggtgccgcgtttcggtgggccggaggtgctggagatcaggcagggcgtgcccgtgcccgatctgaagccgcgggaggtgctcgtgcgcgcacgtgctgtctctatcaaccccctggacctgcgaatgcgatctggctatgggcgctccatattcgagccactcttaccgctgatcattggtcgggacattagtggtgaagttgcagccacagggacttctgcatcgtcattttctattggtcaagaagtgttcggttcgttgcatccaactgctctcagagggacatatgctgactatgctatcctgtcactggacgagcttactctcaaaccatctacactcagtcatgtggaggctagtgcaatcccgtttgctgctttgactgcatggcgtgctttacatggtacggctcgaatttctgaaggacaaagagttcttgtgattggtggaggaggagcagttgggttagctgctgttcaacttgcggtggctgctgggtgtggggtttctgctacctgtggaacccaaagtattgagcgagttataggagctggtgctgaacaagctattgattacactgctgaggatactgaagcagcagttaaaggaaagtttgatgctgttttagacaccataggagtacctgagactgaaagaattggcatcaatgttcttaggagaggtggacactatatgacccttcagggagaagcagctgcactagcagataggtatggattggctgtagggcttcctgctgcgactgctgctttactaaagaaacagacgcagtatcgttattctcatggaatagaatattggtggacatacatgagagctgatgccgaagggcttcatgagatccaaaggctatctggagctgggaaattacagatacctgtggagaagacctttcccatcagccatgcaagagaagctcatgcggccaaggagaaaaagttggttcctggcaaggtggtcctagaattcgattga

SEQ ID NO: 632 - protein, 364 aa, Sorghum bicolor
MWWRAVRARRRVAGARPASTAAAGAEKSCRAVVVPRFGGPEVLEIRQGVPVPDLKPREVLVRARAVSINPLDLRMRSGYGRSIFEPLLPLIIGRDISGEVAATGTSASSFSIGQEVFGSLHPTALRGTYADYAILSLDELTLKPSTLSHVEASAIPFAALTAWRALHGTARISEGQRVLVIGGGGAVGLAAVQLAVAAGCGVSATCGTQSIERVIGAGAEQAIDYTAEDTEAAVKGKFDAVLDTIGVPETERIGINVLRRGGHYMTLQGEAAALADRYGLAVGLPAATAALLKKQTQYRYSHGIEYWWTYMRADAEGLHEIQRLSGAGKLQIPVEKTFPISHAREAHAAKEKKLVPGKVVLEFD

SEQ ID NO: 633 - DNA, 987 bp, Sorghum bicolor
atgagggcggtggtgatcacgcgcggcggcggcggcccggaggtgctggaggcgcaggaggtggaggaacccgcgccgctgggagacggcgaggtcctcctccaggtggccgccgcgggcgttaaccgcgccgacacgctccagcgccacggccgccatccgccgccccccggcgcgcccccttacccggggctcgagtgctccggcactatcctcgcgctcggccccaacgtcccaccgcggtggtccgtcggcgacaaggtctgcgcgctgcttagcggaggcgggtacgcggagaaggtggtggtgccggcgggccagctgttgccggtgccggagggcgtgtcccttacggacgcggccggcttacccgaggtggcctgcaccgtctggtccaccgtgttcatgaccagccacctctctcccggcgaatcgttccttatacatggaggatcaagtggaattggtacgtttgctatacagattgcaaagcacctcggaataaaggtttttatcacagcaggaagtgaagaaaaactagcagcctgcaaagatttgggtgctgatgtatgcattaactacaaaactgaagactttgttgagcgtgtcaaacaggaaactgatgggaaaggtgtcgatgtaattctcgacaacattggaggaccatatctccagcgcaatctgaacagcttaggtgttgatggcagacttttcatcattggcttccaaggcggtgctgtaactgaagtgaacctgcaagctgtgcttgcacggcgtttgaccatacaagctgctggactgcgcaacagaagccttgctaataaagcagagattgttggtgaggtcgaaaagaatgtgtggcctgctgtcgctgctggcaaggtgaagccggtgatttacaagacgtttccgttgtctgaagctgctgaggctcataggttgatggaagctagcacccacatcggcaagatactgctgcttccatga

SEQ ID NO: 634 - protein, 328 aa, Sorghum bicolor
MRAVVITRGGGGPEVLEAQEVEEPAPLGDGEVLLQVAAAGVNRADTLQRHGRHPPPPGAPPYPGLECSGTILALGPNVPPRWSVGDKVCALLSGGGYAEKVVVPAGQLLPVPEGVSLTDAAGLPEVACTVWSTVFMTSHLSPGESFLIHGGSSGIGTFAIQIAKHLGIKVFITAGSEEKLAACKDLGADVCINYKTEDFVERVKQETDGKGVDVILDNIGGPYLQRNLNSLGVDGRLFIIGFQGGAVTEVNLQAVLARRLTIQAAGLRNRSLANKAEIVGEVEKNVWPAVAAGKVKPVIYKTFPLSEAAEAHRLMEASTHIGKILLLP

SEQ ID NO: 635 - DNA, 1041 bp, Sorghum bicolor
atggaggcgctcgttgttcggcggctgggcgacccgacgctggcccccggcggcgaagcctccccgttcgccgcggtctctggggatcatcctgtgccggaaatctcgtcgccaacggcagttagagtgcgagtcgcggcgaccagcctcaacttcgccacgttcctccaggtgcagggcaagtaccaggagcggcccccgctgccgttcgtgcctggatccgactactctggcgtggtcgacgcagtcgggcccggcgtgcgtgggctccggcccggcgatcgcgtctgctcctttaccggcctcgggtccttcgctgacttcatcgtcgccgaggagaagcagctatttttagtgcctgatggatgcgacctggtcacagctggggctttacctgttgcatttggtacatcacatctggcccttgttcaccgagcccaattgaaggctggccaggtgctacttgttcttggtgctgctggtggtgtcggggtatctgctgtgcaaataggaaaagtttgtggtgctgttgttattgcagttgctaggggggctgagaaatcggaatatctcaagtccataggagctgatcatgtagttgactcaagcaaggataatgttgtcgaaagtgccaagtccttcttaaaggctagaggcttgaaaggcgttgatgttttatatgacccagtcggggggaaactaactcaggatagcctgaaacttctcagttggggtgcacacattcttgtcatcggatttgccagtggtgatgttccagttattcgagcaaatattgctcttgttaagaactggacagttcatggtttgtactggggaagctacttaattcatcggccacgagtgctcattgattccctcaatgaactcttgtcgtggctttcaaagggtctgataaaagttcaaatttcacactgctacagacttgttgaggcccatcttgcgttctctgccctgagagataggaaggcggttggcaaagtgatgattgtaatgggcccctcagcagtatcaaggctctga

SEQ ID NO: 636 - protein, 346 aa, Sorghum bicolor
MEALVVRRLGDPTLAPGGEASPFAAVSGDHPVPEISSPTAVRVRVAATSLNFATFLQVQGKYQERPPLPFVPGSDYSGVVDAVGPGVRGLRPGDRVCSFTGLGSFADFIVAEEKQLFLVPDGCDLVTAGALPVAFGTSHLALVHRAQLKAGQVLLVLGAAGGVGVSAVQIGKVCGAVVIAVARGAEKSEYLKSIGADHVVDSSKDNVVESAKSFLKARGLKGVDVLYDPVGGKLTQDSLKLLSWGAHILVIGFASGDVPVIRANIALVKNWTVHGLYWGSYLIHRPRVLIDSLNELLSWLSKGLIKVQISHCYRLVEAHLAFSALRDRKAVGKVMIVMGPSAVSRL

SEQ ID NO: 637 - DNA, 1047 bp, Solanum lycopersicum
atggaagctctacttgtaagaaaactgggcgacccaactctgccaccaaatgcctcagagaagtcgtcactcgatctctcaacatcccaccctatacctaatttggaatcgccaacctccgttagagttcgaatcaaagccaccagcttgaatttcgcaaattatctccaagttcttggcaaataccaagagaaacctccgttacccttcatccctggctccgattactctggcgttgttgaagccgttggccctaatgtcactaagttcaaaattggagacctcgtttgctcttttgttgcccttggctcattcgctcaattcatcgtcgccgatgaatctgacttgtttcaagtacctgatgggtgtgatctagttgcagctggtgcacttcctgttgcatatgggacatcacatgtggcactggtgcatagagcgcagctgcgtcccaaacaggttttactagtgcttggagcagctggaggcgttgggctttcggcggtacaaattgggaaggtttgtggagcgacagttattgcagtggctaggggtaatgaaaaggtgcagtttttgaagtctttaggtgttgatcatgcagtagacttgagcagtgcaaatgtcatcgaaagtgtaaagggcttcctgaagtcaagaaagctcaaaggggtcgatgtcttgtatgatccagtcgggggaaaacttacaaaagatagcttaaagctattaaattggggggcacaaattctggttattggatttgcaagtggggaagtacctgtcgtcccagccaacattgcgttggtgaagaactggacaattcacggactgtattggggaagctataagatacatcaacccaatgtgcttggagattctctgaaggagcttctagcttggttgtctaagggtttgattacagtcaacatttctcatacattcagcctgacagaggcccatcttgcttttactgctctcaaagataggagagcaattggcaaggtgatgataacatttgatggtgggaaaatcgtcaagtccaagctttaa

SEQ ID NO: 638 - protein, 348 aa, Solanum lycopersicum
MEALLVRKLGDPTLPPNASEKSSLDLSTSHPIPNLESPTSVRVRIKATSLNFANYLQVLGKYQEKPPLPFIPGSDYSGVVEAVGPNVTKFKIGDLVCSFVALGSFAQFIVADESDLFQVPDGCDLVAAGALPVAYGTSHVALVHRAQLRPKQVLLVLGAAGGVGLSAVQIGKVCGATVIAVARGNEKVQFLKSLGVDHAVDLSSANVIESVKGFLKSRKLKGVDVLYDPVGGKLTKDSLKLLNWGAQILVIGFASGEVPVVPANIALVKNWTIHGLYWGSYKIHQPNVLGDSLKELLAWLSKGLITVNISHTFSLTEAHLAFTALKDRRAIGKVMITFDGGKIVKSKL

SEQ ID NO: 639 - DNA, 978 bp, Solanum lycopersicum
atgaaggctgttgtaatcacaagccctggtggtccagaagtgttgaagcttcaagaagtggaagacccacaaattaaagatgatgaaatcttgattaagatagcagctactgcccttaatagagctgatacccttcaacgccaaggtaaatacccaccccctaaaggcgacagtgaatacccaggtcttgaatgttctggaactgttgaagcagtcggcaaggaagttactcgctggaaaattggtgatcaggtatgtgctctcattggtggaggtggttatgcggagaaagtagctgtacctactggacaagttcttcctattccatcaggtgtgtctttacaagatgcggctagctttcctgaagtggtgtgcactgtttggtcgaccattttcatgacgagcaagctttcctctggtgaaacgtttctgatacatggaggctctagtggaattggtacgtttgccattcaaatggctaagtgccttggagtcaaagttttcatcacagcaggaagtgaggaaaaactttccgcatgcaaagaactcggggctgatgtttgcatcaattacaagactgaagactttgttacacgcatcaaggaagaaacaggagggaaaggtgttgatgtcatactagataatataggaggttcatacttccaacggaaccttgacagcctcaatgttgatggtaggctcttcattattggttttatgggaggaacagtgacacaagtaaatcttggctgtttgttagcaagacgccttacagtgcaggctgctggcttgcgtagtagaagcccaaaaaacaaagctcaaattgtgagagaagtggaaaaaaatgtttggcctgcaattgcagcagggaaggtgaaaccggtggtgtacaagtacttccccttagcagaagctgctgaggctcaccagttaatggaaagcagcaaccacattggaaagattctgctcactgtttga

SEQ ID NO: 640 - protein, 325 aa, Solanum lycopersicum
MKAVVITSPGGPEVLKLQEVEDPQIKDDEILIKIAATALNRADTLQRQGKYPPPKGDSEYPGLECSGTVEAVGKEVTRWKIGDQVCALIGGGGYAEKVAVPTGQVLPIPSGVSLQDAASFPEVVCTVWSTIFMTSKLSSGETFLIHGGSSGIGTFAIQMAKCLGVKVFITAGSEEKLSACKELGADVCINYKTEDFVTRIKEETGGKGVDVILDNIGGSYFQRNLDSLNVDGRLFIIGFMGGTVTQVNLGCLLARRLTVQAAGLRSRSPKNKAQIVREVEKNVWPAIAAGKVKPVVYKYFPLAEAAEAHQLMESSNHIGKILLTV

SEQ ID NO: 641 - DNA, 1083 bp, Selaginella moellendorffii
atgaggcgctggctcgcttcgccctactgccgtggccacagcaggagcatctcgacatgccgggcggtcgtgctgccgcgattcggcggccccgaggtcttggagctgcgcaaggatgtgcccgtgccgcatttggaggccgaggaagtgcttgtccgcacggtcgccgccggcgtgaatcctctggatatcaagatgagagaaggatacgggaggtctcttttccagcctcttcttccaatcgttctgggaagagatgtgagtggagagattgtggccatcggcaatggagtgaagcggctccacgtaggccagcatgtctttggagcgcttcatccgactgctgtgcgaggtacttacagtgactacgcgatactccaagaggaacagcttgccctcaagccaaagtcactcactcatgtggaagcagctgccattccctttgccgcactgactgcgtggcgagcactgtggagcactgccagaatgaagagcgggcagaaggtgctgatcatgggcgggggaggcgcggtcggcttagcagccattcagctcgctcgagctgctggctgctcggtggctgccacttgtggcaaacgaagttgtagtcgcgtcggggaagctggcgccgagcttatcgtggactacacttccgagaacacaagagagcaacttacctggcgattcgatgctgtacttgacacaatcggtgtggagaccacagaagcacttggagttaacgtgctgaagcgtggtggtcactacatgacgctgcagggagaagcggtgaaactggcagacaaatacggcctcattgttggaggcggcattgcgacagcgacgctcttgcggaagcgaatgcagtacactcagtcgcatggcattgcctgcgcagactactcttggataatcatgaggacggatgccgaaggcctggaacaaatagctcggcttgcgaaagaaggacgcctcaagatcccagtcggagaaactttcagtttggatgaagccgcgaaagctcaaacggcgagagaaaacaaggattcacagggcaaagtggtgctccaagtccagcaggagtaa

SEQ ID NO: 642 - protein, 360 aa, Selaginella moellendorffii
MRRWLASPYCRGHSRSISTCRAVVLPRFGGPEVLELRKDVPVPHLEAEEVLVRTVAAGVNPLDIKMREGYGRSLFQPLLPIVLGRDVSGEIVAIGNGVKRLHVGQHVFGALHPTAVRGTYSDYAILQEEQLALKPKSLTHVEAAAIPFAALTAWRALWSTARMKSGQKVLIMGGGGAVGLAAIQLARAAGCSVAATCGKRSCSRVGEAGAELIVDYTSENTREQLTWRFDAVLDTIGVETTEALGVNVLKRGGHYMTLQGEAVKLADKYGLIVGGGIATATLLRKRMQYTQSHGIACADYSWIIMRTDAEGLEQIARLAKEGRLKIPVGETFSLDEAAKAQTARENKDSQGKVVLQVQQE

SEQ ID NO: 643 - DNA, 978 bp, Selaginella moellendorffii
atgcgagcagtggtagcgaaggggcttggcgggccggaggtgctcgagctgcgcgaggtgcccgatcctgatattggcgacgacgaggtgctcatcaaggtcgcggccgcgggagtgaaccgcgccgacctcctgcagctcaaaggccagcaccctccgccgccgggagccccgccctacctgggcctcgagtgctccggcgtgatcgagcgcctgggcgcgcgcgtggatggatggaaagtcggggacgaggtgtgcgcgctcctggggggcgggggctacgccgagaaagttgcggtggctgcgagccagcttcttccaatcccgcgaggggtctcgctgcgtgatgccgcgtccttgcccgaggttgcgtgcacggtgtggtccaccgtcttcatggcgtgccacctctccgccggggagagcgtcctcatacatggcggcagcagcgggattggcacctttgccatccagatggcgaagtcgattggagcccaagtccttgctactgctggatcggagaaaaagctcgacttgtgcaagcagctgggagcggaggtggcgataaactacaaggacgatgatttcgtcgcgcgcgtgaaagaggccacccacggggaaggtgtggacgtgatactggacatggtgggagcgtcttatttcgagaggaacctggaggccctcggcatggatgggaggctgttcataatcggcttccagggcggggcctcgggccagctgagtttgctgccgatactgaagaaacggctgatagtctcagccgcgggattgcggactcgagctccagagagcaaggcgcaaatcgtagcggaggtgtggcagaatgtgtggccggcggtggaggaaggcaaggtgaagccggtgatttacagggttttcccgctggaggaggcggcccaggccttgcagctcatggtcgccaaccagcatttcggcaagatcttgttgacgccctga

SEQ ID NO: 644 - protein, 325 aa, Selaginella moellendorffii
MRAVVAKGLGGPEVLELREVPDPDIGDDEVLIKVAAAGVNRADLLQLKGQHPPPPGAPPYLGLECSGVIERLGARVDGWKVGDEVCALLGGGGYAEKVAVAASQLLPIPRGVSLRDAASLPEVACTVWSTVFMACHLSAGESVLIHGGSSGIGTFAIQMAKSIGAQVLATAGSEKKLDLCKQLGAEVAINYKDDDFVARVKEATHGEGVDVILDMVGASYFERNLEALGMDGRLFIIGFQGGASGQLSLLPILKKRLIVSAAGLRTRAPESKAQIVAEVWQNVWPAVEEGKVKPVIYRVFPLEEAAQALQLMVANQHFGKILLTP

SEQ ID NO: 645 - DNA, 969 bp, Selaginella moellendorffii
atggcttcgacggtggcagcaatcccatcccttcacaaggcgtgggtgtacaaagagtatggagctgccaaggacgtgctcaaactggaggagcttccagtcccaccgctcgcgcccgaccaggtcctcgtcaaggtacacgcagccgcgttgaatcccgtggatttcaagcggcgattgggcaaattcaaggccacggactcggaccttcccactgttcctggatacgacgtggctggagtggtggccaaagttggaagcgaagtctcgagcttgaagcaaggtgatgaagtctacggtgacatctccgagtttgcgctggacaagccaaaacaatggggatccatcgcccagtacacggcggtggaagagaagctcctggcaatcaagccccggaacttgagtttcatccaggcggcgagcctgcctttggcgatccagacggcacaggaaggattcgacaaggcgaagttgagggcgggacagtctgtgctcgtgcttggaggtgctggaggcgttggatcactcgctatacagcttgcaaagtttgtgtatggagcatcgcttgtggcagccacgactagtactcccaagctggggcttgtcaagtctttgggagccgacattgttatagattataaagagaagaactttgaagacatgccggagagatacgacgttgtttttgatgctgttggtatgttttgggagccaaaaggcacaaatgttgtcaaagaaggaggcactgctgttgttctgactgggccagtaaatcctcctgggtttagatttgtggttacttccaatggatccaatctggtgaggctcaaagacttcttggaaagtggcacagtgaaaccagtgattgatcccaaaggcccctttgattttggtagtgtagtggatgctttttgctacttggaaggtggcagggcatgtggcaaagtggtgatatctgtacttcaatga

SEQ ID NO: 646 - protein, 322 aa, Selaginella moellendorffii
MASTVAAIPSLHKAWVYKEYGAAKDVLKLEELPVPPLAPDQVLVKVHAAALNPVDFKRRLGKFKATDSDLPTVPGYDVAGVVAKVGSEVSSLKQGDEVYGDISEFALDKPKQWGSIAQYTAVEEKLLAIKPRNLSFIQAASLPLAIQTAQEGFDKAKLRAGQSVLVLGGAGGVGSLAIQLAKFVYGASLVAATTSTPKLGLVKSLGADIVIDYKEKNFEDMPERYDVVFDAVGMFWEPKGTNVVKEGGTAVVLTGPVNPPGFRFVVTSNGSNLVRLKDFLESGTVKPVIDPKGPFDFGSVVDAFCYLEGGRACGKVVISVLQ

SEQ ID NO: 647 - DNA, 1104 bp, Solanum tuberosum
atgatccgattgatatctcggaggattgagattggtactggcgatggaggaatttcgaatttaggttttgacaaaagaggtattgttacgagctgtagagctgtgttgttgccgcgatttggtggaccggaggtgcttgagtttcgtgacaatgtagctgttcctgatctaaaacctaatcaagtgcttgttcgtgctcgtgctgtttcaatcaatccacttgataccagaatgcgatcaggatatggacgttcaatttttgaaccacttctaccattgattttgggccgagatataagtggtgaagttgcagctgttggaaattctgtcaagtcacttacagttgggcaggaggtatttggtgctctgcatccaaccgctgtgaggggtacttatactgactatgctattcttgcggaggatgaacttgctccaaagccgggatcactttcacatgcagaagccagtgctatcccttttgctgcgctaactgcttggcgtgcgctaaaaagtactgccagaataagagaggggcatagggtattggtcataggtggaggaggagcagtaggtttctctgcaattcagcttgcagtggctgcaggctgccatgtttctactacatgtggaggagagagtataagtcgcattttagcagccggtgctgagcaggccgttgactataccattgaggatgctgaagtagcacttaaggggcattttgatgctgtcttggatacaattggtgtgccagatacagagagaatgggtattagccttttaaagaaaggtggacactacatgacgttacagggggaggctgcatcggtgactgataggcacggactagctattggtcttcctatggcagcagccatcttgctgaagaagcaaatccaatatcgatattctcatggaatagaatattggtggaattatatgagggctgatgctgagggtttacatgagatacgccggttatctgaggctgggaagcttcaagtcccagtagataaaactttcccaatttcacaggtgagagaggctcacgaggccaaggatagacgacaaattcctggcaaagtggtgctagaaattgactga

SEQ ID NO: 648 - protein, 367 aa, Solanum tuberosum
MIRLISRRIEIGTGDGGISNLGFDKRGIVTSCRAVLLPRFGGPEVLEFRDNVAVPDLKPNQVLVRARAVSINPLDTRMRSGYGRSIFEPLLPLILGRDISGEVAAVGNSVKSLTVGQEVFGALHPTAVRGTYTDYAILAEDELAPKPGSLSHAEASAIPFAALTAWRALKSTARIREGHRVLVIGGGGAVGFSAIQLAVAAGCHVSTTCGGESISRILAAGAEQAVDYTIEDAEVALKGHFDAVLDTIGVPDTERMGISLLKKGGHYMTLQGEAASVTDRHGLAIGLPMAAAILLKKQIQYRYSHGIEYWWNYMRADAEGLHEIRRLSEAGKLQVPVDKTFPISQVREAHEAKDRRQIPGKVVLEID

SEQ ID NO: 649 - DNA, 1089 bp, Triticum aestivum
atggaggcgctcgtggtgcggaagctcggcgatcccacgctgccgcccggcggcgaggactcgccgtttgcggcggtctccggtgaccgaccaattccggagctgtcctcgccgacctccgtgcgggtgcgcgtggcggcaaccagcctcaatttcgcgacgttcctgcaagtgcagggcaagtaccaggagcgccccccgctgccctacgtcccggggtccgactacgccggcgtcgtcgacgccgtcggccccggcgtgcgcagattccgccccggcgaccgcgtctgctccctcgctagcgtcgggtccttcgccgagtttgtcgtcgccgacgagaaggcactatacgcagtccctgatggatgtgacctcgtcgctgctggagcattacctgttgcatttggtacatcacatttggcccttgcccacagagctcaactaaaggctggtcaggtgctacttgtacttggtgctgccggcggtgttggggtatcagctgtacagataggaaaagtttgcggtgctattgtcattgcagttgccaggggagttgagaaattgcagtatctcaagtcaataggagccgatcatgtgattgactcaagcaaggagaatgttattgaaagtgccaagtcctttttaaaggctagtggtctcaaaggtgtcgatgttttatatgaccctgttggtggcaagcttactcaagatagcttgaaacttctcaattggggtgcacatattctgctcattggatttgctagtggggatattccagttattcgagctaacattgcacttattaagaactggacaattcatggtctgtactggggaagctacttaactcaccggccagcagtactcattgactcacttaacgaactcctgtcatggctttcaaagggtttgataacagttaaactttcacacacctacaggctcgctgaggcccatctcgcttttgctgacttgagagataggaaagcggtcggtaaagtgatgatcgttatgggctcctccagcaaaatcaagactttgatggatgagttccctagggtaccggttagttcttttccagctgcctga

SEQ ID NO: 650 - protein, 362 aa, Triticum aestivum
MEALVVRKLGDPTLPPGGEDSPFAAVSGDRPIPELSSPTSVRVRVAATSLNFATFLQVQGKYQERPPLPYVPGSDYAGVVDAVGPGVRRFRPGDRVCSLASVGSFAEFVVADEKALYAVPDGCDLVAAGALPVAFGTSHLALAHRAQLKAGQVLLVLGAAGGVGVSAVQIGKVCGAIVIAVARGVEKLQYLKSIGADHVIDSSKENVIESAKSFLKASGLKGVDVLYDPVGGKLTQDSLKLLNWGAHILLIGFASGDIPVIRANIALIKNWTIHGLYWGSYLTHRPAVLIDSLNELLSWLSKGLITVKLSHTYRLAEAHLAFADLRDRKAVGKVMIVMGSSSKIKTLMDEFPRVPVSSFPAA

SEQ ID NO: 651 - DNA, 963 bp, Theobroma cacao
atggcttcaagcgcaactcttccatctcaaatgaaggcctggacttatgctgaatatggaaaatcatctgatgtcctgaaattaggctcagatgttgctgtaccccaactgaatgatgaccaggttctggtcaaagttgtagcagcagggattaatcctgttgatttcaagagaatgcttggattaatcaaagccgcagattctcctttacctattgttccaggctatgatgttgctggtgtggtggttaaagtgggaagccaagtaaagaaatttaaggaaggggatgaagtatatggggacattaatgagaaggccttggatcacccaaaacaatttggaactatagctgaatacactgctgttgaagagaggctgttggctttcaaaccgaaaaatctgagttttattgaagctgcagggctgcccttagccattgagaccgcccatgaaggccttgaacggtctcagttttctgctgggaaatctatccttgtcttgggtggtgctggtggggtgggcaccatgattattcagctagctaagcaagtctatggagcatccaaagtagcagctacctcaagtacagggaaactggatttgctgaagagcttgggtgctgatttgcctattgattacaccaaggaaaactatgaagatctgccagagaaattcgatgtagtctatgatgcagttggagaatgtgaaagggcagtgaaggcagtgaaggaaggagggcatgttgtggcaatagatgtaacaagtccggtggttccaccagctgtttttttcgttctcacttccaatggggctgttttggagaaactgaatcctttcttggagagtggaaaggttaagccaatgattgatcccaaaggcgtatttcctttttctcaaaccagggaagcctttgcctatcttgaaactggcagagttactggaaaagtagtcatatatctataa

SEQ ID NO: 652 - protein, 320 aa, Theobroma cacao
MASSATLPSQMKAWTYAEYGKSSDVLKLGSDVAVPQLNDDQVLVKVVAAGINPVDFKRMLGLIKAADSPLPIVPGYDVAGVVVKVGSQVKKFKEGDEVYGDINEKALDHPKQFGTIAEYTAVEERLLAFKPKNLSFIEAAGLPLAIETAHEGLERSQFSAGKSILVLGGAGGVGTMIIQLAKQVYGASKVAATSSTGKLDLLKSLGADLPIDYTKENYEDLPEKFDVVYDAVGECERAVKAVKEGGHVVAIDVTSPVVPPAVFFVLTSNGAVLEKLNPFLESGKVKPMIDPKGVFPFSQTREAFAYLETGRVTGKVVIYL

SEQ ID NO: 653 - DNA, 1167 bp, Theobroma cacao
atgaaagccacgcttccatcaacgactcctcagcttaggactttcacttctccaccgctttctttcaaccgttccttcggtttcccggaaaacagaaggaaactaagcggtaccagctctcttctaaggggtgcaccaccttcattctcttacgttccactaagggtcactgcaaattctcaatctgctgcacctgcttctactgaagcggccaaagcgacggctgtgcctagtgaaatgaaggcctgggtatatggggaatatggaggtgttgatgttttgaagtttgatgagaaagtggcggttcctcgagtgaaggaggatcaggttttgatcaaagtggttgctgctgcccttaaccctgttgatggcaagagaagacagggcaagtttaaggctaccgattctcctcttcccactgttccaggctatgatgttgctggtgttgtggtaaaggttggaagtcaagtaaaggagctaaaggaaggagatgaagtgtatggaaacataaatgagaaagcattagaagggcctaaacagtttggctcccttgctgagtacactgccgttgaagagaagctgctggcattaaagcccaagaatctggattttgcccaggctgctggacttcctcttgcttttgagacggcctatgagggtcttgagagaactgggttttcagctggtaaatccattcttgttttgaatggtgctggtggtgttggaagcttagtgattcagttagcgaaacaagtatttggtgcttcaaaagttgcagccacttcgagtaccggaaaacttgaattgttgaagagcttaggtgctgacttggctattgattacacaaaggagaactttgaagatttaccagaaaaatttgatgtagtctatgatgccattgggcaatgtgatagggcagtcaaggcagtgaaagaaggtggcagtgttgtggccctaactggtgctgtcacacctcctggtttcagatttgtggttacttccaatggagaggttctgaagaaactaaatccatatttagagagtggaaaagtgaagccagttgttgatcccaaggggcctttcccatttgctgaggttgctgaggctttctcttacattgaaaccaatcgtgctgttggaaaggtagttatacacccagtcccataa

SEQ ID NO: 654 - protein, 388 aa, Theobroma cacao
MKATLPSTTPQLRTFTSPPLSFNRSFGFPENRRKLSGTSSLLRGAPPSFSYVPLRVTANSQSAAPASTEAAKATAVPSEMKAWVYGEYGGVDVLKFDEKVAVPRVKEDQVLIKVVAAALNPVDGKRRQGKFKATDSPLPTVPGYDVAGVVVKVGSQVKELKEGDEVYGNINEKALEGPKQFGSLAEYTAVEEKLLALKPKNLDFAQAAGLPLAFETAYEGLERTGFSAGKSILVLNGAGGVGSLVIQLAKQVFGASKVAATSSTGKLELLKSLGADLAIDYTKENFEDLPEKFDVVYDAIGQCDRAVKAVKEGGSVVALTGAVTPPGFRFVVTSNGEVLKKLNPYLESGKVKPVVDPKGPFPFAEVAEAFSYIETNRAVGKVVIHPVP

SEQ ID NO: 655 - DNA, 984 bp, Taraxacum officinale
atggttaaagcaattcgaattcatgagcacggcggccctgaggtcttgaaatgggaagaagtggaagtcccagatccaaaagagggagaaataagattgaagcaaacggcaattggtctaaattacttggatgtatacaagcgtcaaaacgtgaggaatctagctccaccgttgccatatactccaggtatggaaggcgccggagttgtgacagcggtgggtcccggagtaaccacctgcaaagtcggagacgttgtggcttacgctagtttacaggacggtgcgtacgccgaagagagaatacttccggcagatctagcggtggctgttccatcttccattgatcccgttgtagcagctgccgtcatttttaaaggactcaccactcatgtcttgatcaataaagggtttaaggttgaacgtggacatacgattctggtacacgcggcggccggcggtgtcgggtctttgctctgtcaatgggcaagtgcgaagggagccaccgtcatcggaacagtgtcgacccaggaaaaggcggtgcaggcgaaagaagatggatgtcaccatgtaattctttacaaagatgagaattttgtcgatcgagtgatggagatagcatcaggcaaaggggtggacgtagtctacgattccgtcgggaaagacactttaaatggatcgctagagtgcttaaattatagtggatgcctggtgagttttgggatagcatccggtgtaccggagcctgtacgttatgatcaacttgtatccaaatcccttgtgctttcatcaatcgggtactacaccgatgttgatcgagatgctctgcaagttgctgccaaagagttgtttgctgatgttgaaaagggagttttgagagttcgtgtcaatcacaagtttcctctctctcaagcatcccaagctcatgctgctatcgagagcagaaaaacgactggttcgattgtgttgattccagatgaagaatga

SEQ ID NO: 656 - protein, 327 aa, Taraxacum officinale
MVKAIRIHEHGGPEVLKWEEVEVPDPKEGEIRLKQTAIGLNYLDVYKRQNVRNLAPPLPYTPGMEGAGVVTAVGPGVTTCKVGDVVAYASLQDGAYAEERILPADLAVAVPSSIDPVVAAAVIFKGLTTHVLINKGFKVERGHTILVHAAAGGVGSLLCQWASAKGATVIGTVSTQEKAVQAKEDGCHHVILYKDENFVDRVMEIASGKGVDVVYDSVGKDTLNGSLECLNYSGCLVSFGIASGVPEPVRYDQLVSKSLVLSSIGYYTDVDRDALQVAAKELFADVEKGVLRVRVNHKFPLSQASQAHAAIESRKTTGSIVLIPDEE

SEQ ID NO: 657 - DNA, 1158 bp, Trifolium pratense
atgtcactctccaccacaatttctcacctcaccattcttccttcacttccttcaacttcatcactttctcatagattttccttcactttccctgaaaaaagaaaccagaaaaattctcatacaactcttttctcttcttcatcaaggtctggtagattcttggtgaagtctcagacttctagtgtatcttcttctgaggctgtgaaagtaacttctgttccttctgaaatgaaggcttgggtgtatggagaatatggtgatgttgatgttttgaaatttgattccagtgttgctgttccagatgttaaagaagatcaggttcttgttaaggttgttgctgctgctcttaatcctgttgatggtaaaagaaggcagggaaaatttaaggctactgattctcctcttccgactgttcctggctatgacgttgctgggattgtagtaaaagttggaagtggagtaaaggaattcaaagtgggtgatgaagtgtatggtgatgtaaatgagaaagcacttgaagggcctaaacagtttgggtctctagctgaatacacagctgttgaggagaaattattggctctaaaacctaagaatttggactttgctcaagctgcttctcttcctcttgcaattgagactgcttatgaaggtttggagaggactggattttcttctggtaaatctattcttgttcttaatggatctggtggggttggaagcttagtgattcagctagctaaacaagtttttggagcttcaagagtagctgccacttcaagcactagacatttggagctgttgaaaagccttggagccgatttggctattgactacacaaaggagaactttgaagatttacctgaaaaatttgatgtagtttatgatgccattgggcaatgtgacagagcagtgaaggctataaaagaaggtggcagtgtagtagcactaacaggtgctgttacaccacctggattcagatttgtagtaacttccaatggagatgttctgaagaaactaaacccttatttagagagtggaaatgtgaagccaattattgatcccaaaggtccattcaactttgctcaagttgctgaagcattctcttacattgaaacaaacaaagctactggaaaagttgttatattccccatcccatga

SEQ ID NO: 658 - protein, 385 aa, Trifolium pratense
MSLSTTISHLTILPSLPSTSSLSHRFSFTFPEKRNQKNSHTTLFSSSSRSGRFLVKSQTSSVSSSEAVKVTSVPSEMKAWVYGEYGDVDVLKFDSSVAVPDVKEDQVLVKVVAAALNPVDGKRRQGKFKATDSPLPTVPGYDVAGIVVKVGSGVKEFKVGDEVYGDVNEKALEGPKQFGSLAEYTAVEEKLLALKPKNLDFAQAASLPLAIETAYEGLERTGFSSGKSILVLNGSGGVGSLVIQLAKQVFGASRVAATSSTRHLELLKSLGADLAIDYTKENFEDLPEKFDVVYDAIGQCDRAVKAIKEGGSVVALTGAVTPPGFRFVVTSNGDVLKKLNPYLESGNVKPIIDPKGPFNFAQVAEAFSYIETNKATGKVVIFPIP

SEQ ID NO: 659 - DNA, 993 bp, Thalassiosira pseudonana
atgcgagccgccatccgcacgggtcttctcggaacgaccatcacattcaccaaggacttccaagctccatcatcgtctcactcggcccttcgtccgaacgaggtgttgctccacgtgaaatctgcagcaattaaccctgtcgactacaagctacctcggttgattggtgggaaaattatcggcattgacgtatcgggagttgttgataaggtgggatcagatgtgacatcatttcaagccggagatcaagtgtttggtcgcgcaattgatggtaaaggaaagctcagtggttctcttgccgagtatacaacagccaatgtggatgaaattgctaaaaagccagagtacttgcagtttgaagaagcagcttcgcttcctactgcctatttgacagggcttcagtctctacgagatgcagggaacgtgaagaaaggatcaacggttctcatcattggggctagcggagggtgtggtattgccggcgttcagcttgcaaaagcaattggtgcagggaggatagttggaatatgttctggtaagaactttgacttcgttcgtagtactggaggtattacagagctggtagactacactgataatgatgtgatgcaaaagttcttggaggacaacgttggagtgtttgattgcatctatgacactgcaactggaagtggagctggagaggactacgtgtctctcatgatgaaactgttgaacaaagattcaggaaagtatgttcaaatcaacggcaatggatctgactgggctcgtactttcgctggaagacaacaaccccaacggacattggttatgacggacaagaatggaaagccgaaactggaagagattgcgacgttgttagaatcaactggggcaaaaccttgtgtgattgtaaagccttttgacgagaaggagctggaagaaggattcaatgaactgaaaggaaggcgtacgaagggcaagattgtgttcaacattggtagagatgagtga

SEQ ID NO: 660 - protein, 330 aa, Thalassiosira pseudonana
MRAAIRTGLLGTTITFTKDFQAPSSSHSALRPNEVLLHVKSAAINPVDYKLPRLIGGKIIGIDVSGVVDKVGSDVTSFQAGDQVFGRAIDGKGKLSGSLAEYTTANVDEIAKKPEYLQFEEAASLPTAYLTGLQSLRDAGNVKKGSTVLIIGASGGCGIAGVQLAKAIGAGRIVGICSGKNFDFVRSTGGITELVDYTDNDVMQKFLEDNVGVFDCIYDTATGSGAGEDYVSLMMKLLNKDSGKYVQINGNGSDWARTFAGRQQPQRTLVMTDKNGKPKLEEIATLLESTGAKPCVIVKPFDEKELEEGFNELKGRRTKGKIVFNIGRDE

SEQ ID NO: 661 - DNA, 1149 bp, Thalassiosira pseudonana
atgacaactcctccgtctgcgttcgctcccacgatgagggctgcgagatgcaccgattatacacccaacaacgattacgatgcagtgctgtctgttgtcgacgatcaacatacacccaatctccaaaccgacaaaccacctgctggcttcacccatccgatgctagttcgtgtactctctgtttccttggcccccggagatgcaagagttatgagtggcaaaacgagagagttgcaaggacctccttcgttgccgtacactcccggcggcgatgtttgtggagtagtcgtagcggtacctgatgaagagaatggaaagaagtgtagattcatggttggagatagaatcgctgctcgcttcatgaacaaaccgatgggtatgctggcagagtatgctctcgtcaatactgatgtgtgcgacgttgttccaccgaacatttcttctgatcaagccgcagcactcgtgtccagtggcacagttgccgtaatccttgccgatgcaatcaatgaaggagacagagtgctcatcctcggagctggaggtggagttggtagtcatctatgtcagttggttcgtctcagaggtgcttcatacgtcgttgctgttggaagagatacggaacggttaaaacaaaagccattgtgctgtgacgacgcagttgattacacacaatccaatccgtttgatacaaaagaatggaaagaagacccgtttgatgttgtctttgatcttggtagtgggggttggcctgctcttctcaatcagagctcgagaaagtcttcaatcgttaagccatccagcaaaggaggcaagttcttgactctaacgccagacactccgttgtttgaagcacactctatttggaagatattgaagatctttctatttcctgcattgtggcgtgctatctacactagggttggattctctcgttcatacctgcccaagtactcgtataagatggcacttccaagctcatctgatgttgttacgagaacgttggcattggctgctgaagagaaactggttcctgtgattgattgcagtggaccatttcccttcacaactgaaggagttcgtgatgctttccgtttgcagtcaagttatcatgcgaaggggaaggtagtaatcaaggttgccgacgtatag

SEQ ID NO: 662 - protein, 382 aa, Thalassiosira pseudonana
MTTPPSAFAPTMRAARCTDYTPNNDYDAVLSVVDDQHTPNLQTDKPPAGFTHPMLVRVLSVSLAPGDARVMSGKTRELQGPPSLPYTPGGDVCGVVVAVPDEENGKKCRFMVGDRIAARFMNKPMGMLAEYALVNTDVCDVVPPNISSDQAAALVSSGTVAVILADAINEGDRVLILGAGGGVGSHLCQLVRLRGASYVVAVGRDTERLKQKPLCCDDAVDYTQSNPFDTKEWKEDPFDVVFDLGSGGWPALLNQSSRKSSIVKPSSKGGKFLTLTPDTPLFEAHSIWKILKIFLFPALWRAIYTRVGFSRSYLPKYSYKMALPSSSDVVTRTLALAAEEKLVPVIDCSGPFPFTTEGVRDAFRLQSSYHAKGKVVIKVADV

SEQ ID NO: 663 - DNA, 981 bp, Triphysaria sp.
atgaaggcaatagtgatcgccgagccaggcgggcctgacgtcctacagttgcgtgaagttgaggaccccaaagtcgaagacgacgaggtcttgattagaattgccgccactgctctcaacagagccgatacccttcagaggcagggcaagtaccctcctcctaaaggcgccagcgagtatctcggccttgaatgctccggcaccgtccaatctgtcggcaaaaatgtccaccgctggaagatcggcgaccaggtatgtgctctcctcggcggagggggatacgcggagaaggttgcggtcccagccgggcaaattctcccggtgccagctggcatttctttagaagatgcaggtagtttacctgaggtagcatgtacggtctggtccaccgtatttatgatgagccacttatccaaaggagagacttttctgatccatgggggctcaagtggaatcggcacatttgctattcagctggctaaataccacggcgtcaaagtgtttgtcactgcaggaagtgaagagaaactggctgcttgcaaggatcttggagctgatgtgtgcatcaactacaagactgaggattttgtttctcgcgtgaaagaagaaactggaggacaaggtgtcgatgtcatactagacagcatcggagcaccatacttaaagaagaacttggaaagcctgaatatcaacgggaggcttttcgtattaggtttaatgggtggatcagtgtctgagataaacctcgccactatgctatcacgacgtcttacacttcaatctgctggcctgcggactaggagcccggaaaacaaggctcagattgtgagtgaggtggagaaaaacgtgtggccggtaattgttgcggggaagataaaaccggtcgtgtataaatcgcttccattagcagaagctatagaagctcatcgtctcatggagagcagcaatcatataggaaagattatcctccttgctcaataa

SEQ ID NO: 664 - protein, 326 aa, Triphysaria sp.
MKAIVIAEPGGPDVLQLREVEDPKVEDDEVLIRIAATALNRADTLQRQGKYPPPKGASEYLGLECSGTVQSVGKNVHRWKIGDQVCALLGGGGYAEKVAVPAGQILPVPAGISLEDAGSLPEVACTVWSTVFMMSHLSKGETFLIHGGSSGIGTFAIQLAKYHGVKVFVTAGSEEKLAACKDLGADVCINYKTEDFVSRVKEETGGQGVDVILDSIGAPYLKKNLESLNINGRLFVLGLMGGSVSEINLATMLSRRLTLQSAGLRTRSPENKAQIVSEVEKNVWPVIVAGKIKPVVYKSLPLAEAIEAHRLMESSNHIGKIILLAQ

SEQ ID NO: 665 - DNA, 1158 bp, Triphysaria sp.
atggatacaatactttcttccccaacattccaactgagaaaacccctaatcctctgcaaccacaacactccatttttatcctttaaacccagcttcaacaggctaacaaaaacaaaccattgtgcccaaaagcgctcgtttcccccaaacccatctctcagaatatgtgcaacctcacaggcttcttctctttctactgaagcctcaacaacttcatctccttctaaaatgaaggcttggacttacactgaatatggtggcgttgaggttttgaagctcgagtctaacgttaatgtccccgaaattaaagatgatcaggttttgatcaaaattgctgctgctgctcttaaccctgttgatttcaagcggagactgggcaaattcaaggccactgattcacctcttccaactgtgccgggctatgatgttgccggtgtggtggtcaaagtcgggagtgaagtcaaaggtctaaaggaaggagatgaagtttacggagatattagtgagaacgcgttagacgggcctaaacagttcgggtcgttagccgagtacacggctgttgaggagaaattattagctctcaagcccaagaacctcgattttacccaggctgctagcctccctcttgcaatcgagacggcttatgagggtcttttgaaggccgggttctccgaaggcaaatctatactcgttctcggtggagctggtggcgttgggtccctcgtcattcagctgtcgaaacaagtgtttggcgcttcaaaggtggcagctacttcaagcacggccaagttggagtttattaaaagcttgggagcggatttagccatcgactacaccaaggaaaactttgaagacctgcccgagaaattcgatctcgtttatgataccgttgggcaatcagatagggcagtgaaggtaattaaggaaggtggcactgtaattgtcctgactggtgcagttacgccccccggttttagatttgtcgtcacatctaatggggagtttttaaagaagcttaatccatacttggagagtggcaaaatgaaggctattgttgatcctaaaggaccattctcgttcgacaaggttaacgaagctttctcgtatttggaaacgggtcgtgctactggaaaggtggtcatttatccgattccttga

SEQ ID NO: 666 - protein, 385 aa, Triphysaria sp.
MDTILSSPTFQLRKPLILCNHNTPFLSFKPSFNRLTKTNHCAQKRSFPPNPSLRICATSQASSLSTEASTTSSPSKMKAWTYTEYGGVEVLKLESNVNVPEIKDDQVLIKIAAAALNPVDFKRRLGKFKATDSPLPTVPGYDVAGVVVKVGSEVKGLKEGDEVYGDISENALDGPKQFGSLAEYTAVEEKLLALKPKNLDFTQAASLPLAIETAYEGLLKAGFSEGKSILVLGGAGGVGSLVIQLSKQVFGASKVAATSSTAKLEFIKSLGADLAIDYTKENFEDLPEKFDLVYDTVGQSDRAVKVIKEGGTVIVLTGAVTPPGFRFVVTSNGEFLKKLNPYLESGKMKAIVDPKGPFSFDKVNEAFSYLETGRATGKVVIYPIP

SEQ ID NO: 667 - DNA, 1128 bp, Triphysaria sp.
atgcggtggctattgcggaggtgtagccaatcggcggtgattggatatggatcaaggaactcgtttcctttacccaaattagggtttcacgaattacagaggacgatagtaacgagctgtagagcggtggttctcccgcggttcggcgggccagaggtgctggagctccgagacaatgtcagcgtacctgatctcaagcctaacgaggtcctcgtgcgcgctcgtgccgtctccgtcaatccgcttgactgcaggatgcgtgaaggctatggccgttcactgtttgaaccgcttctaccgttgatattaggccgcgatattagtggcgaagttgctgctgttgggatctctgtacgttcactcagtgttggccaagaagtatttggtgctctgcatcctactgcattgaggggtacctatactgactatgctattcttgcagaagatgaacttgtctctaaaccagaatcaatttcacatgtggaagcaagtgctataccttttcctgccttgactgcctggcgtgctgtgagaagtacagcaaatattaaagaggggcagagtgttttagtgttgggtggaggaggggctgtaggcttttccgcaattcagcttgccgttgctgttgggtgtcacgtctctacaacatgcgaaagtcaaagtatcagtcgtatcttggcagctggtgctgagcaggctgttgactacgcgactgaggattatgaagtatccctcaaggggtactttgatgctgtattggacacaattggggtacccgagactgaaaggataggtgtcaatcttttgaagagaggtgggcattacatgacgttgcagggagaggctgcatccttgaccgatagatacggtatgataattggccttcctatgtcgaccgcaattttattgaagaagcaaatacaataccggtattctcatggaatagaatttcattggacttacatgagggctgacgatgaaggcttggaagaaatccgcaggctatctgaggctggaaaactgaaaatacctgtggagaaaacttttcccattacacaagtcagagaggctcatgagaccaaggataagagactcattttcggtaaagtcgttcttgaactggattaa

SEQ ID NO: 668 - protein, 375 aa, Triphysaria sp.
MRWLLRRCSQSAVIGYGSRNSFPLPKLGFHELQRTIVTSCRAVVLPRFGGPEVLELRDNVSVPDLKPNEVLVRARAVSVNPLDCRMREGYGRSLFEPLLPLILGRDISGEVAAVGISVRSLSVGQEVFGALHPTALRGTYTDYAILAEDELVSKPESISHVEASAIPFPALTAWRAVRSTANIKEGQSVLVLGGGGAVGFSAIQLAVAVGCHVSTTCESQSISRILAAGAEQAVDYATEDYEVSLKGYFDAVLDTIGVPETERIGVNLLKRGGHYMTLQGEAASLTDRYGMIIGLPMSTAILLKKQIQYRYSHGIEFHWTYMRADDEGLEEIRRLSEAGKLKIPVEKTFPITQVREAHETKDKRLIFGKVVLELD

SEQ ID NO: 669 - DNA, 1134 bp, Vitis vinifera
atggaagctgttctcaactccacaaccacatacctacccacacctcgtcacctctcctcaacccactcatatccactccctttttctctctctttccgggaaagtaggagaaaattctctcccaaacaggcctccgtcttgagagtcttcgctagctcccaagctgcccctgcctcatctgctgctgtgacaataccatctcaaatgaaggcttgggtttatggagactatggaggagttgatgttttgaaatttgatacagctgtttcggtgcctccagtgaaggaggaccaggttctgatcaaggttgttgctgcagcgcttaaccctgttgatgccaagaggaggcaggggaaattcaaggccactgattctcctcttccgactgttcctggatatgatgtggctggggtggtggtaaaggttggaagccaagtaaaggaactgaaggaaggggatgaagtatatggagacataaacgagaaagcattggatgggcctaagcagtttggctcgtttgcagaatacactgctgttgaagagaaactgttggctctgaaaccaaagaatctggattttgttcaagctgctggacttcctcttgcaattgagacagcctatgagggtctcgaaaggactggattttctgctggtaaatctattcttgttttgggtggggctggtggagttggaagccttgtcatccagcttgcgaaacaagtgttcggtgcctcaagagttgccgctacatcaagcacagcgaaactggagctcttgaagagcttgggagctgatttgacgattgactacactaaggagaactttgaagatttggcagagaaattcgatgtagtttatgatgcagttgggcagtgtgataaggcagtgaaggtagtgaaagaaggaggcagcgtggtggcattaacaggtgccgtgacgcctcctggtttcagatttgtagtaacttcaaacggagaggtgttgaagaaactgaacccatatttggagagcgggaaggtgaagccagtggttgatcccaagggaccatttccattttctcaggttgttgaagctttctcctacgttgaaacaagccgagccactggaaagatagttatacatccgattccatga

SEQ ID NO: 670 - protein, 377 aa, Vitis vinifera
MEAVLNSTTTYLPTPRHLSSTHSYPLPFSLSFRESRRKFSPKQASVLRVFASSQAAPASSAAVTIPSQMKAWVYGDYGGVDVLKFDTAVSVPPVKEDQVLIKVVAAALNPVDAKRRQGKFKATDSPLPTVPGYDVAGVVVKVGSQVKELKEGDEVYGDINEKALDGPKQFGSFAEYTAVEEKLLALKPKNLDFVQAAGLPLAIETAYEGLERTGFSAGKSILVLGGAGGVGSLVIQLAKQVFGASRVAATSSTAKLELLKSLGADLTIDYTKENFEDLAEKFDVVYDAVGQCDKAVKVVKEGGSVVALTGAVTPPGFRFVVTSNGEVLKKLNPYLESGKVKPVVDPKGPFPFSQVVEAFSYVETSRATGKIVIHPIP

SEQ ID NO: 671 - DNA, 1086 bp, Vitis vinifera
atgaggttttcgaagctccgcaccttccaaatcccaggtacggcgtcgtttcgatgcagattcatcgtcaccacttgcagagctgttgtcttgccccgtttcggaggaccgcacgtgctggagcttcgacccgatgcccctgttccggatctcaagcccactgaggttctcgttagaactcgcgccgtatccattaatccgcttgatactagaatgcgatcaggctatggtcgttccatatttggaccacttttgccactcatattgggtcgtgatattagtggtgaagttgcagccactggagcgtcagtccggtcattatctgttggacaggaggtctttggtgcactgcatcccactgctgtgaggggtacttatgctgactatgcaattctttcagaagatgaacttacttcaaagccagtatcaatttcccatgtggaagcaagtgcgattccttttgctgcactgactgcatggcgtgctctaaagagtactgctagaatagctgagggacaaaggatactaattgtgggtggaggaggagcagtaggctttgctgcaattcagctctgtgtagctacagggtgccatgtttctaccacttgcggaagccaaagcttggcatggatattggctgctggtgccgagcaggctgttgactatacttccgaggacattgaatcagcattaaaagggaacttcgatgctgttttggatacaattggtgttccagatacagaaagagtaggaattaatcttttgaagcgaggtggacactatatgactttgcagggagaggcagcatccctgagtgataggtatggactagctgttgggcttccagcagctacggccatgttactgaagaaacaactgcaataccgattttcccatggaatagagtattcttggacatacatgagggccgactccgaaggtttatacgagatctgcaagctatctgaagctgggaagcttaaaatacctgtggagaaaacatttcccataacacaagtgagggaggctcatgaggcgaaggacaaccggcagattcctggtaaggtagttctggaacttgattga

SEQ ID NO: 672 - protein, 361 aa, Vitis vinifera
MRFSKLRTFQIPGTASFRCRFIVTTCRAVVLPRFGGPHVLELRPDAPVPDLKPTEVLVRTRAVSINPLDTRMRSGYGRSIFGPLLPLILGRDISGEVAATGASVRSLSVGQEVFGALHPTAVRGTYADYAILSEDELTSKPVSISHVEASAIPFAALTAWRALKSTARIAEGQRILIVGGGGAVGFAAIQLCVATGCHVSTTCGSQSLAWILAAGAEQAVDYTSEDIESALKGNFDAVLDTIGVPDTERVGINLLKRGGHYMTLQGEAASLSDRYGLAVGLPAATAMLLKKQLQYRFSHGIEYSWTYMRADSEGLYEICKLSEAGKLKIPVEKTFPITQVREAHEAKDNRQIPGKVVLELD

SEQ ID NO: 673 - DNA, 990 bp, Zea mays
atgagaatgagggccgtggtgatcacgtgcgccggcgggccggaggtgctggaggcgcgggaggtggaggaccatcccgcgctaggcgaaggagaggtgctcctcgaggtcgccgccgcgggcgtcaatcgcgcggacaccgtgcagcggatgggccggtacccgccgcctgccggcgcgtccccttacccggggctcgagtgctccggcaccatcctcgcgctcggccccaacgtcccctcccgctgggccgtgggcgataaggtttgcgcgctcctcagcggcggcgggtacgcggataaggtggtggcgccggcggggcagctgctgccgatacccgagggggtgtcgctgacgcacgcagccggcttgcccgaggtggcctgcaccgtctggtcaaccgtattcatgaccagtcacctctcccccggtgaatcattccttatccatggaggatccagtggaattggtacattcgctatacagattgctaagcacctcggaattaaggtttttgtcactgcaggaagtgaagaaaaactagcagcctgcaaagctttgggtgccgatgtatgcattaactacagaactgaagacttcgttgaacgtatcaaacaggaaaccaacggaaagggtgttgatgtgattctggataacattggaggatcatatctccagcgcaacctgaatagcttaggtgttgatggtagacttttcatcattggcttccaagggggcatagcagctgaagtgaacctgcaagctgtgcttgcacgccgtttgaccatacaagctgctggactgcgcaacagaagccttgctaataaggcagagattgttagtgaggtggaaaagaacgtgtggcctgctgtcgctgctggcaaagtgaagccggtgatttacaagacgtttccgttatgtgaagctgctgaggctcataggttgatggaagctagcacccacatcggcaagatactgctgctcccatga

SEQ ID NO: 674 - protein, 329 aa, Zea mays
MRMRAVVITCAGGPEVLEAREVEDHPALGEGEVLLEVAAAGVNRADTVQRMGRYPPPAGASPYPGLECSGTILALGPNVPSRWAVGDKVCALLSGGGYADKVVAPAGQLLPIPEGVSLTHAAGLPEVACTVWSTVFMTSHLSPGESFLIHGGSSGIGTFAIQIAKHLGIKVFVTAGSEEKLAACKALGADVCINYRTEDFVERIKQETNGKGVDVILDNIGGSYLQRNLNSLGVDGRLFIIGFQGGIAAEVNLQAVLARRLTIQAAGLRNRSLANKAEIVSEVEKNVWPAVAAGKVKPVIYKTFPLCEAAEAHRLMEASTHIGKILLLP

SEQ ID NO: 675 - DNA, 1161 bp, Zingiber officinale
atggaagctctgctcggttcgcccattagcactaccttccccttctccttccccatcgcaagaccatctttaagatcctccccctctcttcccatcacgccaacaacaagccaacgtgcagcaataaccgccgttgctccaggtaatttccgtcggcctcaggcgagctccgacccctcagcttcttcttccaccgacacactagttgcttcttccggggagccttcgaagatgaaggcctgggtctacgacgagtacggtgacgtcagtgtgctgcgcgccgaagatggggtcttggtccctcaagtggaggaggaccaggtcctcgtcaaggtcgtggcggccgcgctgaaccccgtggattttaagcgtatgcagggaaagtttaaggccactgattcacccttaccgactattccaggttatgatgtagctgggattgtcgttaaagtggggagccaagtgaagatcctgaaggaaggagatgaagtgtacggggacatcaacgagaaaactctggagagccccaagcaatctggatcgctggcagaattcacggccgtggaggagaaattgctggctttaaagccccaaaaaatagactttgcacaggctgcaggtttgccactggctatcgaaacagcctacgaagggctcgagaaagcagggttttcggccggtaaaactattctcgttcttggtggtgcaggtggagttggctctctggttatccaggtagcaaagcaagttcttggagcatcgagagttgctgcaacagccagcaccggaaaactggagttactgaaaagcctaggagttgatttggcaattgactatacaaaggagaacttcgaagacttacctgagaaattcgacgtcgtatttgatactgtcggtcagggagataaagcagtgaaggcagtgaaagaaggcggctgcgtggtcgtgcttacgggcgcagtgacaccgccgggcttcaggttcgttgtcacctctgatggcgcttccttgaccaagttgaatcctttcattgaagaagggaaaattaagccagtggtggatccgaagggaccattccctttctctcaagtggttgaggcatttacttatcttgaaactgggagggcaacaggaaaggtcgtcatttacccaattccatga

SEQ ID NO: 676 - protein, 386 aa, Zingiber officinale
MEALLGSPISTTFPFSFPIARPSLRSSPSLPITPTTSQRAAITAVAPGNFRRPQASSDPSASSSTDTLVASSGEPSKMKAWVYDEYGDVSVLRAEDGVLVPQVEEDQVLVKVVAAALNPVDFKRMQGKFKATDSPLPTIPGYDVAGIVVKVGSQVKILKEGDEVYGDINEKTLESPKQSGSLAEFTAVEEKLLALKPQKIDFAQAAGLPLAIETAYEGLEKAGFSAGKTILVLGGAGGVGSLVIQVAKQVLGASRVAATASTGKLELLKSLGVDLAIDYTKENFEDLPEKFDVVFDTVGQGDKAVKAVKEGGCVVVLTGAVTPPGFRFVVTSDGASLTKLNPFIEEGKIKPVVDPKGPFPFSQVVEAFTYLETGRATGKVVIYPIP

SEQ ID NO: 677 - DNA, 1092 bp, Zea mays
atgtggtggagggcggtgaggcgccggtgggtcgcgacggcgcggcccgcgtcctccgcggcggcgggggcggagaagagctgccgcgccgtggtggtgccgcgtttcggtgggccggaggtgctcgaggtcaggcagggcatgcctgtgcccgatctgaagccgcaggaggtgctcgtgcgcgcacgcgctgtctctatcaaccccctggacctccgaatgcgatgtggctatgggcgctccatattcgaaccactcctacctctgatcattggtcgggacattagcggtgaagttgcggccaccggaactttggcatcgtctttttctattggccaagaagtgtttggttcgttgcatccaactgctctcagagggacatatgctgattatgctatcctgtcactggacgagcttactctcaaaccatctacactcagtcatgtggaggctagtgcaatcccgtttgctgctttgactgcatggcgcgctttacatggtacggctcgtatttctgaaggacaaagagttcttgtgattggtggaggaggagcggttggattagctgctgttcaacttgcggtggctgctgggtgtgtggtttctgctacctgtggaacacaaagtattgagcgagttatgggagttggtgctgaacaagctattgactacactgctgaggatactgaagcagcaattaaaggaaagtttgatgctgttttagacaccataggagtacctgagacagaaagaattggcatcaatgttcttaggagaggtggacactatatgacccttcagggagaagcagctgccctagcagataggtatggattggctgtagggcttcctgctgctactgctgttttactaaagaaacagatgcagtatcgttattctcatggaatagagtattggtggacatacatgagagctgacgccgaaggccttcacgagatccaaaggctatctggagctgggaaactacagatacctgtggagaagacctttcccatcagccatgtaagagaagctcatgcggccaaggagaaaaagttggctcctggcaaggtggttctggaattcgattaa

SEQ ID NO: 678 - protein, 363 aa, Zea mays
MWWRAVRRRWVATARPASSAAAGAEKSCRAVVVPRFGGPEVLEVRQGMPVPDLKPQEVLVRARAVSINPLDLRMRCGYGRSIFEPLLPLIIGRDISGEVAATGTLASSFSIGQEVFGSLHPTALRGTYADYAILSLDELTLKPSTLSHVEASAIPFAALTAWRALHGTARISEGQRVLVIGGGGAVGLAAVQLAVAAGCVVSATCGTQSIERVMGVGAEQAIDYTAEDTEAAIKGKFDAVLDTIGVPETERIGINVLRRGGHYMTLQGEAAALADRYGLAVGLPAATAVLLKKQMQYRYSHGIEYWWTYMRADAEGLHEIQRLSGAGKLQIPVEKTFPISHVREAHAAKEKKLAPGKVVLEFD

SEQ ID NO: 679 - DNA, 1161 bp, Zea mays
atgcacgcgttcctctcttcgtcgatcccggccacttcgtactcgagatcatacttcttgccgcggccgcctcaggctcccgtgaagctcgtcgtcccgtcgtcagcgccgagggtcgccgccggtagaagaacagcttcggaagctggtcggtcgggacggtgcgtcgtcgcggtgtccgcgtcctcgtccccggccacggccgcggtggcgacggaggtgcccggggtgatgaaggcctgggtgtacgacgcgtacggggacgccggcgtgctcaagctcgacgaggccgcggctgtgccggccgtgggcgaggaccaggtgctcgtcaaggtcgtcgccgcggcgctcaaccccgtcgatgccaagcggcgggccggcaagttccaggccaccgactcccctctcccgaccgtgccggggtacgacttgtccggcgtcgtcgtcaaggtgggcagccaggtgaagaagttgaaggaaggcgacgaggtgtacggcatggtcagcgagaatccgctgcaggggcccaagcagtccggctcgctggcggaatacaccgccgtcgaggagaagctgctggcgctcaagcccaagggcctcgacttcgcgcaggccgccagcctgccgctagccgtcgagaccgccaacgagggcctggagagggcaggaatatccgccggcaagtccgtcctcatcctcggtggcgccggcggtgtcggctcccttgcgatccagctagcgaagcatgtctacggcgcgtccaaggtagctgcgacggccagcaccaagaagatcgagctgctcaagagcctaggtgccgatgtcgccatcgactacactaaggagaacttggaagagctaccggacaaatacgacattgtcttcgacggagtcggtcagggtgacaaagctgtcaaggtagtgaaggaaggcggcagcgtggtggttctcaccggcgccgtcagccctccagggttccggttcgtcgtcacctccaacggctccgtcttggagaagctcaacccgtacctcgagtcagggaagctgaagccactcatcgacccggaggggcccttctccttctcgcaggttgtggaggcgttctcctaccttgagaccgggagggcaaccggcaaagtagtcatctctcccatcccatga

SEQ ID NO: 680 - protein, 386 aa, Zea mays
MHAFLSSSIPATSYSRSYFLPRPPQAPVKLVVPSSAPRVAAGRRTASEAGRSGRCVVAVSASSSPATAAVATEVPGVMKAWVYDAYGDAGVLKLDEAAAVPAVGEDQVLVKVVAAALNPVDAKRRAGKFQATDSPLPTVPGYDLSGVVVKVGSQVKKLKEGDEVYGMVSENPLQGPKQSGSLAEYTAVEEKLLALKPKGLDFAQAASLPLAVETANEGLERAGISAGKSVLILGGAGGVGSLAIQLAKHVYGASKVAATASTKKIELLKSLGADVAIDYTKENLEELPDKYDIVFDGVGQGDKAVKVVKEGGSVVVLTGAVSPPGFRFVVTSNGSVLEKLNPYLESGKLKPLIDPEGPFSFSQVVEAFSYLETGRATGKVVISPIP

SEQ ID NO: 681 - protein, 21 aa, Artificial sequence
  motif 8
  VARIANT (9)..(9): Xaa can be Ala or Gly
  VARIANT (10)..(10): Xaa can be Asn or Gly
  VARIANT (11)..(11): Xaa can be Thr, Ala or Leu
  VARIANT (12)..(12): Xaa can be His or Arg
YAVQLAKLXXXXVTATCGARN

SEQ ID NO: 682 - protein, 21 aa, Artificial sequence
  motif 9
  VARIANT (6)..(6): Xaa can be Val or Ala
  VARIANT (7)..(7): Xaa can be Met, Leu or Ile
  VARIANT (10)..(10): Xaa can be Lys or Arg
  VARIANT (13)..(13): Xaa can be Glu, Asp or Gln
  VARIANT (16)..(16): Xaa can be Ser, Ala, Lys or Ile
  VARIANT (18)..(18): Xaa can be Lys, Arg or Gln
LGADEXXDYXTPXGAXLXSPS

SEQ ID NO: 683 - protein, 32 aa, Artificial sequence
  motif 10
  VARIANT (1)..(1): Xaa can be Gly or Ala
  VARIANT (3)..(3): Xaa can be Lys or Gln
  VARIANT (4)..(4): Xaa can be His or Phe
  VARIANT (7)..(7): Xaa can be Val, Ile or Leu
  VARIANT (9)..(9): Xaa can be Val or Ile
  VARIANT (11)..(11): Xaa can be Ser, Thr, Ala or Met
  VARIANT (12)..(12): Xaa can be Ala, Pro or Val
  VARIANT (15)..(15): Xaa can be Asn, Asp or Gly
  VARIANT (17)..(17): Xaa can be Val or Leu
  VARIANT (19)..(19): Xaa can be Leu or Ile
  VARIANT (20)..(20): Xaa can be Lys or Arg
  VARIANT (21)..(21): Xaa can be Leu, Met or Val
  VARIANT (22)..(22): Xaa can be Glu or Gln
  VARIANT (24)..(24): Xaa can be Thr or Ala
  VARIANT (25)..(25): Xaa can be Ser or Thr
  VARIANT (26)..(26): Xaa can be Ile, Val or Leu
  VARIANT (28)..(28): Xaa can be Pro, Gln or Val
  VARIANT (29)..(29): Xaa can be Val or Ile
XLXXVEXPXPXXKKXEXLXXXXAXXXNXXDWK

SEQ ID NO: 684 - protein, 43 aa, Artificial sequence
  motif 11
  VARIANT (1)..(1): Xaa can be Gly or Ala
  VARIANT (3)..(3): Xaa can be Lys or Gln
  VARIANT (4)..(4): Xaa can be His or Phe
  VARIANT (7)..(7): Xaa can be Val, Ile or Leu
  VARIANT (9)..(9): Xaa can be Val or Ile
  VARIANT (11)..(11): Xaa can be Ser, Thr, Ala or Met
  VARIANT (12)..(12): Xaa can be Ala, Pro or Val
  VARIANT (15)..(15): Xaa can be Asn, Asp or Gly
  VARIANT (17)..(17): Xaa can be Val or Leu
  VARIANT (19)..(19): Xaa can be Leu or Ile
  VARIANT (20)..(20): Xaa can be Lys or Arg
  VARIANT (21)..(21): Xaa can be Leu, Met or Val
  VARIANT (22)..(22): Xaa can be Glu or Gln
  VARIANT (24)..(24): Xaa can be Thr or Ala
  VARIANT (25)..(25): Xaa can be Ser or Thr
  VARIANT (26)..(26): Xaa can be Ile, Val or Leu
  VARIANT (28)..(28): Xaa can be Pro, Gln or Val
  VARIANT (29)..(29): Xaa can be Val or Ile
  VARIANT (33)..(33): Xaa can be Ile or Phe
  VARIANT (35)..(35): Xaa can be Lys or Asn
  VARIANT (37)..(37): Xaa can be Met, Asp or Leu
  VARIANT (38)..(38): Xaa can be Leu, Val, Met or Ala
  VARIANT (41)..(41): Xaa can be Phe or Leu
  VARIANT (42)..(42): Xaa can be Leu, Met or His
XLXXVEXPXPXXKKXEXLXXXXAXXXNXXDWKXQXGXXRPXXP

SEQ ID NO: 685 - protein, 21 aa, Artificial sequence
  motif 12
  VARIANT (2)..(2): Xaa can be Val or Ala
  VARIANT (3)..(3): Xaa can be Leu or Met
  VARIANT (6)..(6): Xaa can be Lys, Arg, Ala or Asn
  VARIANT (9)..(9): Xaa can be Glu or Asp
  VARIANT (11)..(11): Xaa can be Ala or Thr
  VARIANT (12)..(12): Xaa can be Ala, Ser, Thr, Arg or Lys
  VARIANT (13)..(13): Xaa can be Leu or Met
  VARIANT (14)..(14): Xaa can be Arg, Gln or Thr
  VARIANT (16)..(16): Xaa can be Pro or Ser
  VARIANT (17)..(17): Xaa can be Ser or Ala
  VARIANT (18)..(18): Xaa can be Gly or Ser
  VARIANT (19)..(19): Xaa can be Arg, Lys or Thr
  VARIANT (20)..(20): Xaa can be Lys, Arg or Glu
  VARIANT (21)..(21): Xaa can be Tyr or Lys
EXXDYXTPXGXXXXSXXXXXX

SEQ ID NO: 686 - protein, 29 aa, Artificial sequence
  motif 13
  VARIANT (4)..(4): Xaa can be Gly or Ser
  VARIANT (5)..(5): Xaa can be Gly or Ala
  VARIANT (8)..(8): Xaa can be His, Leu or Thr
  VARIANT (9)..(9): Xaa can be Tyr or Phe
  VARIANT (10)..(10): Xaa can be Ala, Pro or Leu
  VARIANT (12)..(12): Xaa can be Gln or His
  VARIANT (15)..(15): Xaa can be Lys, Arg or Ser
  VARIANT (16)..(16): Xaa can be Leu, Met or Arg
  VARIANT (17)..(17): Xaa can be Ala or Gly
  VARIANT (18)..(18): Xaa can be Gly or Asn
  VARIANT (19)..(19): Xaa can be Leu or His
  VARIANT (20)..(20): Xaa can be His or Arg
  VARIANT (21)..(21): Xaa can be Val, Ile or Tyr
  VARIANT (22)..(22): Xaa can be Thr or Arg
  VARIANT (24)..(24): Xaa can be Thr or Leu
  VARIANT (25)..(25): Xaa can be Cys or Arg
  VARIANT (27)..(27): Xaa can be Ala or Arg
  VARIANT (28)..(28): Xaa can be Arg or Asn
  VARIANT (29)..(29): Xaa can be Asn or Met
AASXXVGXXXVXLAXXXXXXXXAXXGXXX

SEQ ID NO: 687 - protein, 50 aa, Artificial sequence
  motif 14
  VARIANT (1)..(1): Xaa can be Thr or His
  VARIANT (2)..(2): Xaa can be Cys or Leu
  VARIANT (3)..(3): Xaa can be Gly or Arg
  VARIANT (4)..(4): Xaa can be Ala or Gly
  VARIANT (5)..(5): Xaa can be Arg or Gly
  VARIANT (7)..(7): Xaa can be Val, Met or Ala
  VARIANT (8)..(8): Xaa can be Glu or Asp
  VARIANT (10)..(10): Xaa can be Val or Leu
  VARIANT (11)..(11): Xaa can be Lys or Arg
  VARIANT (12)..(12): Xaa can be Ser or Gly
  VARIANT (19)..(19): Xaa can be Leu or Met
  VARIANT (22)..(22): Xaa can be Arg or Lys
  VARIANT (28)..(28): Xaa can be Ser or Thr
  VARIANT (29)..(29): Xaa can be Leu or Met
  VARIANT (30)..(30): Xaa can be Gln or Arg
  VARIANT (35)..(35): Xaa can be Lys or Arg
  VARIANT (36)..(36): Xaa can be Lys or Arg
  VARIANT (38)..(38): Xaa can be Asp or Asn
  VARIANT (39)..(39): Xaa can be Gly or Val
  VARIANT (44)..(44): Xaa can be Thr or Ala
  VARIANT (45)..(45): Xaa can be Val or Ala
  VARIANT (46)..(46): Xaa can be Gly or Arg
  VARIANT (47)..(47): Xaa can be Val, Ile or Thr
  VARIANT (48)..(48): Xaa can be Ser or Gly
  VARIANT (50)..(50): Xaa can be Ser or Pro
XXXXXNXXLXXXLGADEVXDYXTPEGAXXXSPSGXXYXXVVHCXXXXXWX

SEQ ID NO: 688 - protein, 50 aa, Artificial sequence
  motif 15
  VARIANT (1)..(1): Xaa can be His or Leu
  VARIANT (4)..(4): Xaa can be Val or Leu
  VARIANT (8)..(8): Xaa can be Ser, Thr, Met or Ala
  VARIANT (10)..(10): Xaa can be Lys or Gln
  VARIANT (14)..(14): Xaa can be Val or Leu
  VARIANT (19)..(19): Xaa can be Glu or Gln
  VARIANT (20)..(20): Xaa can be Ala or Val
  VARIANT (22)..(22): Xaa can be Thr or Ser
  VARIANT (23)..(23): Xaa can be Ile or Val
  VARIANT (30)..(30): Xaa can be Ile, Val or Leu
  VARIANT (34)..(34): Xaa can be Asp, Met or Leu
  VARIANT (35)..(35): Xaa can be Leu or Met
  VARIANT (36)..(36): Xaa can be Arg or Gln
  VARIANT (38)..(38): Xaa can be Leu, Phe or Ile
  VARIANT (42)..(42): Xaa can be Arg or Lys
  VARIANT (43)..(43): Xaa can be Leu or Phe
XVEXPVPXAXKNEXLLKLXXAXXNPVDWKXQKGXXXPXLPRXXPFIPVTD

SEQ ID NO: 689 - protein, 50 aa, Artificial sequence
  motif 16
  VARIANT (12)..(12): Xaa can be Leu or Val
  VARIANT (13)..(13): Xaa can be Lys, Gly or Glu
  VARIANT (14)..(14): Xaa can be Glu, Asp or Gly
  VARIANT (16)..(16): Xaa can be Lys or Asn
  VARIANT (17)..(17): Xaa can be Leu or Met
  VARIANT (18)..(18): Xaa can be Lys, Arg or Glu
  VARIANT (20)..(20): Xaa can be Val or Leu
  VARIANT (21)..(21): Xaa can be Ile or Val
  VARIANT (24)..(24): Xaa can be Arg or Lys
  VARIANT (26)..(26): Xaa can be Pro, Ser or Leu
  VARIANT (28)..(28): Xaa can be Ser or Gly
  VARIANT (29)..(29): Xaa can be Glu or Asp
  VARIANT (30)..(30): Xaa can be Ala or Val
  VARIANT (31)..(31): Xaa can be Gly, Asp or Ala
  VARIANT (35)..(35): Xaa can be Gln or Glu
  VARIANT (36)..(36): Xaa can be Lys, Ser or Thr
  VARIANT (38)..(38): Xaa can be Ile or Val
  VARIANT (39)..(39): Xaa can be Asp or Glu
  VARIANT (42)..(42): Xaa can be Ala or Pro
  VARIANT (47)..(47): Xaa can be Val or Ile
NKADLEFLVGLXXXGXXXTXXDSXFXLXXXXKAWXXSXXGHXTGKIXVEM

SEQ ID NO: 690 - DNA, 49 bp, Artificial sequence
  primer: prm24481
ggggacaagtttgtacaaaaaagcaggcttaaacaatggccaccccgac

SEQ ID NO: 691 - DNA, 47 bp, Artificial sequence
  primer: prm24482
ggggaccactttgtacaagaaagctgggtttgacgacgatcagctct

SEQ ID NO: 692 - DNA, 2194 bp, Oryza sativa; identical to SEQ ID NO: 310

1. A method for enhancing one or more yield-related traits in a plant, comprising modulating expression in a plant of
(i) an isolated nucleic acid encoding a quinone reductase (QRR) polypeptide comprising one or more InterPro domains represented by accession number IPR002085, IPR011032, IPR013154 and IPR020843; or
(ii) a nucleic acid encoding a FKBP16-3 polypeptide comprising (a) an FKBP_C domain (Pfam PF00254), or a FKBP_PPIASE domain (ProfileScan PS50059), or a PEPTIDYL-PROLYL CIS-TRANS ISOMERASE domain (HMMPanther PTHR10516), and/or (b) a conserved region having at least 70%, 71%, 72%, 73%, 74%, 75%, 76%, 77%, 78%, 79%, 80%, 81%, 82%, 83%, 84%, 85%, 86%, 87%, 88%, 89%, 90%, 91%, 92%, 93%, 94%, 95%, 96%, 97%, 98%, or 99% sequence identity to the conserved region starting with amino acid A116 up to amino acid F239 in SEQ ID NO: 2.

2. The method according to claim 1, wherein said QRR polypeptide comprises one or more of the following motifs:
(i) Motif 8 (SEQ ID NO: 681):
YAVQLAKL[AG][NG][TAL][HR]VTATCGARN
(ii) Motif 9 (SEQ ID NO: 682):
LGADE[VA][MLI]DY[KR]TP[EDQ]GA[SAKI]L[KRQ]SPS
(iii) Motif 10 (SEQ ID NO: 683):
[GA]L[KQ][HF]VE[VIL]P[VI]P[STAM][APV]KK[NDG]E
[VL]L[LI][KR][LMV][EQ]A[TA][ST][IVL]N[PQV]
[VI]DWK
(iv) Motif 11 (SEQ ID NO: 684):
[GA]L[KQ][HF]VE[VIL]P[VI]P[STAM][APV]KK[NDG]E
[VL]L[LI][KR][LMV][EQ]A[TA][ST][IVL]N[PQV]
[VI]DWK[IF]Q[KN]G[MDL][LVMA]RP[FL][LMH]P
(v) Motif 12 (SEQ ID NO: 685):
E[VA][LM]DY[KRAN]TP[ED]G[AT][ASTRK][LM][RQT]S
[PS][SA][GS][RKT][KRE][YK]
(vi) Motif 13 (SEQ ID NO: 686):
AAS[GS][GA]VG[HLT][YF][APL]V[QH]LA[KRS][LMR]
[AG][GN][LH][HR][VIY][TR]A[TL][CR]G[AR][RN]
[NM]
(vii) Motif 14 (SEQ ID NO: 687):
[TH][CL][GR][AG][RG]N[VMA][ED]L[VL][KR][SG]LG
ADEV[LM]DY[RK]TPEGA[ST][LM][QR]SPSG[KR][KR]Y
[DN][GV]VVHC[TA][VA][GR][VIT][SG]W[SP]
(viii) Motif 15 (SEQ ID NO: 688):
[HL]VE[VL]PVP[STMA]A[KQ]KNE[VL]LLKL[EQ][AV]A
[TS][IV]NPVDWK[IVL]QKG[DML][LM][RQ]P[LFI]LPR
[RK][LF]PFIPVTD
(ix) Motif 16 (SEQ ID NO: 689):
NKADLEFLVGL[LV][KGE][EDG]G[KN][LM][KRE]T[VL]
[IV]DS[RK]F[PSL]L[SG][ED][AV][SGDA]KAW[QE]
[KST]S[IV][DE]GH[AP]TGKI[VI]VEM

3. The method according to claim 1, wherein said QRR polypeptide has quinone reducing activity.

4. The method according to claim 1, wherein said FKBP16-3 polypeptide comprises one or more of motifs 1 to 3 (SEQ ID NO: 301 to SEQ ID NO: 303), one or more of motifs 1 (SEQ ID NO: 301), 4 (SEQ ID NO: 304) or 3 (SEQ ID NO: 303), or one or more of motifs 5 to 7 (SEQ ID NO: 305 to SEQ ID NO: 307).

5. The method according to claim 1, wherein said modulated expression is effected by introducing and expressing in a plant a nucleic acid encoding said QRR polypeptide or said FKBP16-3 polypeptide.

6. The method according to claim 1, wherein said enhanced yield-related traits comprise increased yield, increased seed yield, and/or increased biomass relative to control plants.

7. The method according to claim 1, wherein said conditions of abiotic stress comprise drought stress, salt stress or nitrogen deficiency.

8. The method according to claim 1, wherein said nucleic acid encoding a QRR or FKBP16-3 polypeptide is of plant origin, from a monocotyledonous plant, from a plant of the Poaceae family, or from a Triticum aestivum plant.

9. The method according to claim 1,
(i) wherein said nucleic acid encoding a QRR polypeptide encodes any one of the polypeptides listed in Table A2 or is a portion of such a nucleic acid, or a nucleic acid capable of hybridising with a complementary sequence of such a nucleic acid, or is a nucleic acid encoding an orthologue or a paralogue of SEQ ID NO: 312; or
(ii) wherein said nucleic acid encoding a FKBP16-3 polypeptide encodes any one of the polypeptides listed in Table A1 or is a portion of such a nucleic acid, or a nucleic acid capable of hybridising with the complement of such a nucleic acid, or is a nucleic acid encoding an orthologue or a paralogue of SEQ ID NO: 2.

10. The method according to claim 1, wherein said nucleic acid encodes the polypeptide represented by SEQ ID NO: 312 or SEQ ID NO: 2.

11. The method according to claim 1, wherein said nucleic acid encoding a QRR or FKBP16-3 polypeptide is operably linked to a constitutive promoter of plant origin, a medium strength constitutive promoter of plant origin, to a GOS2 promoter, to or a GOS2 promoter from rice.

12. A plant, or part thereof, or plant cell, obtainable by the method according to claim 1, wherein said plant, plant part or plant cell comprises a recombinant nucleic acid encoding said QRR polypeptide or said FKBP16-3 polypeptide.

13. A construct comprising:
(i) a nucleic acid encoding a QRR polypeptide or a FKBP16-3 polypeptide as defined in claim 1;
(ii) one or more control sequences capable of driving expression of the nucleic acid of (i); and optionally
(iii) a transcription termination sequence.

14. The construct according to claim 13, wherein one of said control sequences is a constitutive promoter of plant origin, a medium strength constitutive promoter of plant origin, mere preferably a GOS2 promoter, or a GOS2 promoter from rice.

15. A method for making plants having one or more enhanced yield-related traits, increased yield, increased seed yield, and/or increased biomass relative to control plants, comprising transforming the construct of claim 13 into a plant, plant part or plant cell.

16. A plant, plant part or plant cell or a host cell transformed with the construct according to claim 13.

17. A method for the production of a transgenic plant having one or more enhanced yield-related traits, increased yield, increased seed yield, and/or increased biomass relative to a control plant, comprising:
(i) introducing and expressing in a plant cell or plant an isolated nucleic acid encoding a QRR polypeptide or an FKBP16-3 polypeptide as defined in claim 1; and
(ii) cultivating said plant cell or plant under conditions promoting plant growth and development.

18. A transgenic plant having one or more enhanced yield-related traits, increased yield, increased seed yield, and/or increased biomass, resulting from modulated expression of a nucleic acid encoding a QRR or an FKBP16-3 polypeptide as defined in claim 1, or a transgenic plant cell derived from such transgenic plant.

19. The transgenic plant according to claim 18, or a transgenic plant cell derived therefrom, wherein said plant is a crop plant, a monocotyledonous plant, or a cereal, or wherein said plant is such as beet, sugarbeet, alfalfa, sugarcane, rice, maize, wheat, barley, millet, rye, triticale, sorghum, emmer, spelt, einkorn, teff, milo, or oats.

20. Harvestable parts of the plant according to claim 19, wherein said harvestable parts are seeds and/or shoot biomass.

21. A product derived from the plant according to claim 19 and/or from harvestable parts of said plant.

22. (canceled)

23. A recombinant chromosomal DNA comprising the construct according to claim 13.

24. An isolated nucleic acid molecule selected from the group consisting of:
(i) a nucleic acid represented by SEQ ID NO: 311 or SEQ ID NO: 1;
(ii) the complement of a nucleic acid represented by SEQ ID NO: 311 or SEQ ID NO: 1;
(iii) a nucleic acid encoding a QRR polypeptide having at least 95% sequence identity to the amino acid sequence represented by SEQ ID NO: 312 and additionally or alternatively comprising one or more motifs having at least 95% sequence identity to any one or more of the motifs given in SEQ ID NO: 681 to SEQ ID NO: 689, and conferring enhanced yield-related traits relative to control plants;
(iv) a nucleic acid encoding a FKBP16-3 polypeptide having at least 95% sequence identity to the amino acid sequence represented by SEQ ID NO: 2 and additionally or alternatively comprising one or more motifs having at least 95% sequence identity to any one or more of the motifs given in SEQ ID NO: 301 to SEQ ID NO: 307, and conferring one or more enhanced yield-related traits relative to control plants; and
(v) a nucleic acid molecule which hybridizes with a nucleic acid molecule of (i) to
(iv) under high stringency hybridization conditions and preferably confers one or more enhanced yield-related traits relative to control plants.

25. An isolated polypeptide selected from the group consisting of:
(i) an amino acid sequence represented by SEQ ID NO: 312 or SEQ ID NO: 2;
(ii) an amino acid sequence having at least 95% sequence identity to the amino acid sequence represented by SEQ ID NO: 312, and additionally or alternatively comprising one or more motifs having at least 95% sequence identity to any one or more of the motifs given in SEQ ID NO: 681 to SEQ ID NO: 689, and conferring enhanced yield-related traits relative to control plants;
(iii) an amino acid sequence having at least 95% sequence identity to the amino acid sequence represented by SEQ ID NO: 2, and additionally or alternatively comprising one or more motifs having at least 95% or more sequence identity to any one or more of the motifs given in SEQ ID NO: 301 to SEQ ID NO: 307, and conferring one or more enhanced yield-related traits relative to control plants;
(iv) derivatives of any of the amino acid sequences given in (i) to (iii) above.

26. A construct comprising:
(i) the nucleic acid as defined in claim 24;
(ii) one or more control sequences capable of driving expression of the nucleic acid of (i); and optionally
(iii) a transcription termination sequence.
